(19) United States
(12) Patent Application Publication
(10) Pub. No.: US 2025/0361508 A1
(43) Pub. Date: Nov. 27, 2025

(54) POLYNUCLEIC ACID MOLECULES TARGETING AGT AND USES THEREOF

(71) Applicant: Sirius Therapeutics, Inc., San Diego, CA (US)

(72) Inventors: Curt BRADSHAW, San Diego, CA (US); Anthony NICHOLAS, Oregon, WI (US)

(21) Appl. No.: 19/238,232

(22) Filed: Jun. 13, 2025

Related U.S. Application Data
(63) Continuation of application No. PCT/US2023/084940, filed on Dec. 19, 2023.
(60) Provisional application No. 63/434,029, filed on Dec. 20, 2022.

(51) Int. Cl. C12N 15/113; A61K 9/00; A61P 9/12; C12N 15/11

(52) U.S. Cl. CPC C12N 15/113; A61K 9/0019; A61P 9/12; C12N 15/111; C12N 2310/14; C12N 2310/315; C12N 2310/321; C12N 2310/322; C12N 2310/351; C12N 2320/32

(57) ABSTRACT

Disclosed herein are polynucleic acid molecules that can be utilized for suppressing the expression of angiotensinogen (AGT). Also, described herein are pharmaceutical compositions comprising polynucleic acid molecules targeting angiotensinogen (AGT) mRNA. Further, provided herein are methods for suppressing the expression of angiotensinogen (AGT) by utilizing the polynucleic acid molecules described herein.

### CROSS-REFERENCE

[0001] This application is a continuation of International Application No. PCT/US2023/084940, filed Dec. 19, 2023, which claims the benefit of U.S. Provisional Application No. 63/434,029, filed on Dec. 20, 2022, all of which are incorporated herein by reference in their entirety.

### SEQUENCE LISTING

[0002] The instant application contains a Sequence Listing which has been submitting electronically in XML format and is hereby incorporated by reference in its entirety. Said XML copy, created Jun. 13, 2025, is named “61382-718_301_SL.xml” and is 4,814,180 bytes in size.

### BACKGROUND OF THE DISCLOSURE

[0003] Angiotensinogen (AGT) plays an important role in regulating blood pressure and other metabolic processes. Accordingly, there is a need for developing an effective AGT inhibitor without cytotoxicity. The polynucleic acid molecules, conjugates thereof, and methods described herein satisfy this need and provide related advantages.

### INCORPORATION BY REFERENCE

[0004] All publications, patents, and patent applications mentioned in this specification are herein incorporated by reference to the same extent as if each individual publication, patent, or patent application was specifically and individually indicated to be incorporated by reference. To the extent publications and patents or patent applications incorporated by reference contradict the disclosure contained in the specification, the specification is intended to supersede and/or take precedence over any such contradictory material.

### SUMMARY OF THE DISCLOSURE

[0005] To meet the need for a more effective AGT inhibitor, disclosed herein, in certain aspects, are polynucleic acid molecules for modulating expression of angiotensinogen (AGT) gene, wherein the polynucleic acid molecule comprises a nucleic acid sequence in Table 1, Table 3, Table 5, Table 7, Table 9, Table 11, Table 13, or Table 15.

[0006] In some aspects, the polynucleic acid molecule is a double-stranded nucleic acid molecule comprising a passenger strand and a guide strand. In some instances, the passenger strand comprises at least 85%, at least 90%, at least 95% identical to a nucleic acid sequence selected from SEQ ID NOs: 385-576, 897-960, and 1051-1063. In some instances, the guide strand comprises at least 85%, at least 90%, at least 95% identical to a nucleic acid sequence selected from SEQ ID NOs: 1-192, 769-832, and 1025-1037. In some instances, the passenger strand comprises a nucleic acid sequence comprising at least 16, 17, 18, 19, or 20 consecutive nucleotides of a nucleic acid sequence selected from SEQ ID NOs: 385-576, 897-960, and 1051-1063, with no more than 1, 2, 3, or 4 mismatches. In some instances, the guide strand comprises a nucleic acid sequence comprising at least 16, 17, 18, 19, or 20 consecutive nucleotides of a nucleic acid sequence selected from SEQ ID NOs: 1-192, 769-832, and 1025-1037, with no more than 1, 2, 3, or 4 mismatches. In some instances, the passenger strand comprises one of SEQ ID NOs: 385-576, 897-960, and 1051-1063, and the guide strand comprises one of SEQ ID NOs: 1-192, 769-832, and 1025-1037. In some instances, the passenger strand comprises a nucleic acid sequence selected from SEQ ID NOs: 1051-1063 and the guide strand comprises a nucleic acid sequence selected from SEQ ID NOs: 1025-1037.

[0007] In some instances, the polynucleic acid molecule comprises (1) a 2′-fluoro modified nucleotides; (2) a 2′-O-methyl modified nucleotides; or (3) a modified internucleotide linkage. In some instances, the polynucleic acid molecule comprises at least two consecutive modified internucleotide linkages at the 5′ end. In some instances, the polynucleic acid molecule comprises at least two internucleotide linkages among three internucleotide linkages at the 3′end substituted with modified internucleotide linkages.

[0008] In some instances, the passenger strand comprises ‘5-nsnsnnnnNfnNfnNfrnnnnnnnnn-3’, wherein the guide strand comprises ‘5-nsNfsnnnnNfnnnnNfnNfnNfnnnnnsnsn-3’, wherein “Nf” stands for a 2′-fluoro modified nucleotide, “n” stands for a 2′-O-methyl modified nucleotide, “s” stands for a 3′-phosphorothioate. In some instances, the passenger strand comprises ‘5-nsnsnnnnNfnNfNfNfnnnnnnnnnn-3’, wherein the guide strand comprises ‘5-nsNfsnnnNfnNfNfnnnnNfnNfnnnnnsnsn-3’, wherein “Nf” stands for a 2′-fluoro modified nucleotide, “n” stands for a 2′-O-methyl modified nucleotide, “s” stands for a 3′-phosphorothioate. In some instances, the passenger strand comprises ‘5-nsnsnnnnnnNfnNfnnnnnnnnn-3’, wherein the guide strand comprises ‘5-nsNfsnnnnnnnnnNfnNfnnnnnnnsnsn-3’, wherein “Nf” stands for a 2′-fluoro modified nucleotide, “n” stands for a 2′-O-methyl modified nucleotide, “s” stands for a 3′-phosphorothioate. In some instances, the passenger strand comprises ‘5-nsnsnnnnNfnNfnNfrnnnnnnnnn-3’, wherein the guide strand comprises ‘5-nsNfsnnnnnnnnnNfnNfnNfnnnnnsnsn-3’, wherein “Nf” stands for a 2′-fluoro modified nucleotide, “n” stands for a 2′-O-methyl modified nucleotide, “s” stands for a 3′-phosphorothioate.

[0009] In some instances, the modified internucleotide linkage is a phosphorothioate linkage. In some instances, the phosphorothioate linkage is a stereochemically enriched phosphorothioate internucleotide linkage. In some instances, the stereochemically enriched phosphorothioate internucleotide linkage is an S_{P} chiral internucleotide phosphorothioate linkage. In some instances, the polynucleic acid comprises a plurality of modified internucleotide linkages, and at least 1, 2, 3, or 4 of the plurality of modified internucleotide linkages are stereochemically enriched phosphorothioate internucleotide linkages. In some instances, the stereochemically enriched phosphorothioate internucleotide linkages comprise both R- and S-isomers. In some instances, the stereochemically enriched phosphorothioate internucleotide linkage(s) is disposed between two consecutive nucleosides that are two of six 5′ or 3′ end nucleosides of the passenger strand or the guide strand.

[0010] In some instances, the polynucleic acid molecule comprises a hypoxanthine nucleobase-containing nucleoside substitution. In some instances, the hypoxanthine nucleobase-containing nucleoside substitution is an inosine substitution. In some instances, the inosine substitution is within a seed region of the guide strand. In some instances, the inosine substitution is within 7 nucleotides from the 5′ end of the guide strand. In some instances, the polynucleic acid molecule comprises an abasic substitution. In some instances, the abasic substitution is at the 5^{th} or 7^{th} nucleotide from the 5′ end.

[0011] In some instances, the cytotoxicity of the polynucleic acid molecule is decreased compared to unmodified polynucleic acid.

[0012] In some instances, the passenger strand comprises a nucleic acid sequence that is at least 80%, at least 85%, at least 90%, at least 95% identical to a nucleic acid sequence selected from SEQ ID NOs: 577-768, 961-1024, and 1064-1076. In some instances, the passenger strand comprises a nucleic acid sequence comprising at least 14, 15, 16, 17, 18, 19, or 20 consecutive nucleotides of a nucleic acid sequence selected from SEQ ID NOs: 577-768, 961-1024, and 1064-1076 with no more than 1, 2, 3, or 4 mismatches. In other instances, the guide strand comprises a nucleic acid sequence that is at least 80%, at least 85%, at least 90%, at least 95% identical to a nucleic acid sequence selected from SEQ ID NOs: 193-384, 833-896, and 1038-1050. In other instances, the guide strand comprises a nucleic acid sequence comprising at least 14, 15, 16, 17, 18, 19, or 20 consecutive nucleotides of a nucleic acid sequence selected from SEQ ID NOs: 193-384, 833-896, and 1038-1050 with no more than 1, 2, 3, or 4 mismatches. In some instances, the passenger strand comprises a nucleic acid sequence selected from SEQ ID NOs: 577-768, 961-1024, and 1064-1076 and the guide strand comprises a nucleic acid sequence selected from SEQ ID NOs: 193-384, 833-896, and 1038-1050.

[0013] In some instances, the polynucleic acid molecule is a single-stranded nucleic acid molecule. In some instances, the polynucleic acid molecule is 16-30 base pairs in length. In some instances, the polynucleic acid molecule is 19-25, or 21-23 base pairs in length.

[0014] In some aspects, the guide strand comprises a nucleotide analogue selected from a group consisting of acyclic L-threoninol nucleic acid-thymine-3′-phosphate (T-T), acyclic L-threoninol nucleic acid-adenine-3′-phosphate (T-A), acyclic N-acetyl L-threoninol abasic nucleic acid-3′-phosphate (T-NAc), 1′,2′-Dideoxyribose-3′phosphate (dAB), and thymidine-glycol nucleic acid (GNA) S-isomer (Tgn). In some instances, the nucleotide analogue is located at the seed region of the guide strand (positions 2-8) from the 5′ end. In some instances, the nucleotide analogue is located at any one of positions 4-8, positions 5-8, or positions 6-8 from the 5′ end of the guide strand. In some instances, the guide strand comprises a nucleic acid sequence selected from Table 9, Table 11, Table 13 or Table 15. In some instances, the passenger guide strand comprises a nucleic acid sequence selected from Table 9, Table 11, Table 13 or Table 15.

[0015] In another aspect, provided herein are polynucleic acid molecules for modulating expression of angiotensinogen (AGT) gene, wherein polynucleic acid molecule comprises: (a) a guide strand comprising the nucleotide sequence of usAfsugccAfuauaUfaCfgGfaagccscsa (SEQ ID NO: 1038) and a passenger strand comprising the nucleotide sequence of gsgscuucCfgUfaUfauauggcaua (SEQ ID NO: 1064); (b) a guide strand comprising the nucleotide sequence of usUfsgaacCfugucAfaUfcUfucucasgsc (SEQ ID NO: 1039) and a passenger strand comprising the nucleotide sequence of usgsagaaGfaUfuGfacagguucaa (SEQ ID NO: 1065); (c) a guide strand comprising the nucleotide sequence of usAfsugaaCfcuguCfaAfuCfuucucsasg (SEQ ID NO: 1040) and a passenger strand comprising the nucleotide sequence of gsasgaagAfuUfgAfcagguucaua (SEQ ID NO: 1066); (d) a guide strand comprising the nucleotide sequence of usUfsugagGfgaguUfuUfgCfuggaasasg (SEQ ID NO: 1041) and a passenger strand comprising the nucleotide sequence of ususccagCfaAfaAfcucccucaaa (SEQ ID NO: 1067); (e) a guide strand comprising the nucleotide sequence of usGfsuuucUfucauCfcAfgUfugaggsgsa (SEQ ID NO: 1042) and a passenger strand comprising the nucleotide sequence of cscsucaaCfuGfgAfugaagaaaca (SEQ ID NO: 1068); (f) a guide strand comprising the nucleotide sequence of usAfsuuuuUfgcagGfuUfcAfgcucgsgsu (SEQ ID NO: 1043) and a passenger strand comprising the nucleotide sequence of csgsagcuGfaAfcCfugcaaaaaua (SEQ ID NO: 1069); (g) a guide strand comprising the nucleotide sequence of usAfsuugcUfcaauUfuUfuGfcaggususc (SEQ ID NO: 1044) and a passenger strand comprising the nucleotide sequence of ascscugcAfaAfaAfuugagcaaua (SEQ ID NO: 1070); (h) a guide strand comprising the nucleotide sequence of usUfsacacAfgcaaAfcAfgGfaauggsgsc (SEQ ID NO: 1045) and a passenger strand comprising the nucleotide sequence of cscsauucCfuGfuUfugcuguguaa (SEQ ID NO: 1071); (i) a guide strand comprising the nucleotide sequence of usUfsugauCfauacAfcAfgCfaaacasgsg (SEQ ID NO:1046) and a passenger strand comprising the nucleotide sequence of usgsuuugCfuGfuGfuaugaucaaa (SEQ ID NO: 1072); (j) a guide strand comprising the nucleotide sequence of usAfsaacaCfugguUfcUfuGfccuccscsc (SEQ ID NO: 1047) and a passenger strand comprising the nucleotide sequence of gsgsaggcAfaGfaAfccaguguuua (SEQ ID NO: 1073); (k) a guide strand comprising the nucleotide sequence of usGfsucggUfuggaAfuUfcUfuuuugsgsa (SEQ ID NO: 1048) and a passenger strand comprising the nucleotide sequence of csasaaaaGfaAfuUfccaaccgaca (SEQ ID NO: 1074); (1) a guide strand comprising the nucleotide sequence of usUfsuucaCfaaacAfaGfcUfggucgsgsu (SEQ ID NO: 1049) and a passenger strand comprising the nucleotide sequence of csgsaccaGfcUfuGfuuugugaaaa (SEQ ID NO: 1075); (m) a guide strand comprising the nucleotide sequence of usGfsuuucAfcaaaCfaAfgCfuggucsgsg (SEQ ID NO: 1050) and a passenger strand comprising the nucleotide sequence of gsasccagCfuUfgUfuugugaaaca (SEQ ID NO: 1076); (n) a guide strand comprising the nucleotide sequence of usAfsgaccAfaggaGfaAfaCfggcugscsu (SEQ ID NO: 345) and a passenger strand comprising the nucleotide sequence of csasgccgUfuUfcUfccuuggucua (SEQ ID NO: 729); (o) a guide strand comprising the nucleotide sequence of usGfsucgGf(T-T)uggaAfuUfcUfuuuugsgsa (SEQ ID NO: 2261) and a passenger strand comprising the nucleotide sequence of csasaaaaGfaAfuUfccaaccgaca (SEQ ID NO: 1074); (p) a guide strand comprising the nucleotide sequence of usGfsucggUf(T-NAc)ggaAfuUfcUfuuuugsgsa (SEQ ID NO: 2211) and a passenger strand comprising the nucleotide sequence of csasaaaaGfaAfuUfccgaccgaca (SEQ ID NO: 2233); (q) a guide strand comprising the nucleotide sequence of usGfsucggUf(T-T)ggaAfuUfcUfuuuugsgsa (SEQ ID NO: 2302) and a passenger strand comprising the nucleotide sequence of csasaaaaGfaAfuUfccaaccgaca (SEQ ID NO: 1074); or (r) a guide strand comprising the nucleotide sequence of usGfsucgGf(T-NAc)uggaAfuUfcUfuuuugsgsa (SEQ ID NO: 2303) and a passenger strand comprising the nucleotide sequence of csasaaaaGfaAfuUfccagccgaca (SEQ ID NO: 2232); wherein smaller case “n” stands for 2′-O-methyl modified nucleotide, upper case followed with an “f” (i.e., “Nf”) stands for 2′-fluoro modified nucleotide, “(T-NAc)” stands for acyclic N-acetyl L-threoninol abasic nucleic acid-3′-phosphate, “(T-T)” stands for acyclic L-threoninol nucleic acid-thymine-3′-phosphate, and “s” stands for 3′-phosphorothioate.

[0016] In some aspects, disclosed herein are polynucleic acid molecule conjugates for modulating expression of AGT gene, wherein the polynucleic acid molecule conjugate comprises a polynucleic acid molecules described herein and an asialoglycoprotein receptor targeting moiety. In some instances, the polynucleic acid molecule and the asialoglycoprotein receptor targeting moiety is coupled via a linker. In some instances, the linker comprises formula (IV) below,

[chemical structure]

wherein at least one of Y1 and Y2 is a nucleotide in the polynucleic acid molecule. In some instances, the Y1 is the last nucleotide on the 3′ end of the passenger strand of the polynucleic acid molecule. In other instances, the Y1 and Y2 are two consecutive nucleotides in the polynucleic acid molecule. In some instances, asialoglycoprotein receptor targeting moiety comprises N-Acetylgalactosamine (GalNAc). In some instances, the linker and the asialoglycoprotein receptor targeting moiety with the last nucleotide on the 3′ end of the passenger strand of the polynucleic acid molecule are shown in:

[chemical structure]

[chemical structure]

wherein Z in formula (V′), (V″″), (V′″″), or (V″″″) is —H, —OH, —O-Methyl, —F, or —O-methoxyethyl, and R in formula (V′), (V″″), (V′″″), or (V″″″) is adenine, uracil, guanine, cytosine, thymine, abasic, or others.

[0017] In some aspects, provided herein are pharmaceutical compositions comprising a polynucleic acid molecules described herein or a polynucleic acid molecule conjugates described herein, and a pharmaceutically acceptable excipient. In some instances, the pharmaceutical composition is formulated as a nanoparticle formulation. In some instances, the pharmaceutical composition is formulated for parenteral, oral, intranasal, buccal, rectal, transdermal, intravenous, subcutaneous, or intrathecal administration.

[0018] In some aspects, provided herein are methods of modulating expression of angiotensinogen (AGT) gene in a subject, comprising: administering to the subject the polynucleic acid molecules described herein, the polynucleic acid molecule conjugates described herein, or the pharmaceutical compositions described herein, thereby modulating the expression of AGT gene in the subject.

[0019] In some aspects, provided herein are methods of preventing, alleviating, or treating hypertension in a subject in need thereof, comprising: administering to the subject the polynucleic acid molecules described herein, the polynucleic acid molecule conjugates described herein, or the pharmaceutical compositions described herein, thereby modulating the expression of AGT gene in the subject. In some aspects, provided herein are methods of preventing, alleviating, or treating atherosclerosis in a subject in need thereof, comprising: administering to the subject the polynucleic acid molecules described herein, the polynucleic acid molecule conjugates described herein, or the pharmaceutical compositions described herein, thereby modulating the expression of AGT gene in the subject. In some cases, the subject suffers from a coronary artery disease. In some aspects, provided herein are methods of preventing, alleviating, or treating obesity in a subject in need thereof, comprising: administering to the subject the polynucleic acid molecules described herein, the polynucleic acid molecule conjugates described herein, or the pharmaceutical compositions described herein, thereby modulating the expression of AGT gene in the subject

### BRIEF DESCRIPTION OF THE DRAWINGS

[0020] Various aspects of the disclosure are set forth with particularity in the appended claims. A better understanding of the features and advantages of the present disclosure will be obtained by reference to the following detailed description that sets forth illustrative aspects, in which the principles of the disclosure are utilized, and the accompanying drawings below.

[0021] FIG. 1 depicts the in vivo efficacy of siRNAs targeting AGT mRNA in HuAoGen (transgenic AGT) Mice. The results are shown as relative human AGT mRNA expression on day 28 following siRNA treatment.

[0022] FIG. 2 depicts the in vivo efficacy of siRNAs targeting AGT mRNA in cynomolgus monkeys. The results are shown as % changes in serum AGT concentrations following siRNA treatment on on day 1 and day 43.

[0023] FIG. 3 depicts the in vivo efficacy of additional siRNAs targeting AGT mRNA in HuAoGen Mice. The results are shown as relative human AGT mRNA expression on day 28 following siRNA treatment.

[0024] FIG. 4 depicts the in vivo efficacy of modified siRNAs targeting AGT mRNA in HuAoGen Mice. The results are shown as relative human AGT mRNA expression on day 35 following siRNA treatment.

[0025] FIG. 5 depicts the in vivo efficacy of additional modified siRNAs targeting AGT mRNA in HuAoGen Mice. The results are shown as relative human AGT mRNA expression on day 35 following siRNA treatment.

[0026] FIG. 6 depicts the in vivo efficacy of modified siRNAs targeting AGT mRNA in HuAoGen Mice. The results are shown as relative human AGT mRNA expression on day 42 following siRNA treatment.

[0027] FIG. 7 depicts the in vivo efficacy of modified siRNAs targeting AGT mRNA in cynomolgus monkeys. The results are shown as % change in serum AGT following siRNA treatment on Day 1.

### DETAILED DESCRIPTION OF THE DISCLOSURE

[0028] Angiotensinogen (AGT) a glycoprotein in the rennin-angiotensin system. After various cleavages by different enzymes, AGT is converted to a varieties of angiotensin peptides, among which angiotensin (Ang) II regulates blood pressure and sodium/water homeostasis. Human AGT is mainly synthesized in hepatocytes. After cleavage and processing, AGT can be converted to AngI which is secreted into plasma or extracellular compartments.

[0029] AGT mRNA is mainly detected in many organs or tissues such as liver, adipose, brain, heart, kidneys, and vessels, and is most abundant in livers. At cellular level, AGT is synthesized in hepatocytes, adipocytes, proximal tubule epithelial cells, and astrocytes.

[0030] M235T was first identified from a screening of AGT's single nucleotide polymorphisms (SNPs) to implicate a causal relationship between the AGT gene and hypertension in humans. See Jeunemaitre X et al. Molecular basis of human hypertension: role of angiotensinogen. Cell. 1992; 71:169-180. With more investigation, M235T of AGT is shown to be associated with atherosclerosis in different populations. See, e.g., Katsuya T et al. Association of angiotensinogen gene T235 variant with increased risk of coronary heart disease. Lancet. 1995; 345:1600-1603. In addition, T174M may also be related to risk factors or prevalence of coronary artery disease. See, e.g., Gardemann A et al. Angiotensinogen T174M and M235T gene polymorphisms are associated with the extent of coronary atherosclerosis. Atherosclerosis. 1999; 145:309-314. AGT may also play an important role in obesity in humans.

[0031] Described herein is a polynucleic acid molecule for modulating expression of AGT gene, wherein the polynucleic acid molecule comprises a passenger strand and a guide strand, and wherein the polynucleic acid molecule comprises a nucleic acid sequence in Table 1, Table 3, Table 5, Table 7, Table 9, Table 11, Table 13, or Table 15. Accordingly, provided herein are various target regions of human AGT mRNA the polynucleic acid molecule described herein hybridizes to. In some embodiments, provided herein is the sequences of the polynucleic acid molecule described herein. In some embodiments, provided herein is the possible modifications of the polynucleic acid molecule described herein. In some embodiments, provided herein is the possible conjugates of the polynucleic acid molecule described herein.

[0032] Also described herein is a method of modulating expression of angiotensinogen (AGT) gene in a subject. Described further herein is a method of modulating LDL and/or cholesterol in a subject in need thereof.

### Definitions

[0033] The singular form “a”, “an”, and “the” include plural references unless the context clearly dictates otherwise. For example, the term “a cell” includes one or more cells, including mixtures thereof “A and/or B” is used herein to include all of the following alternatives: “A”, “B”, “A or B”, and “A and B.”

[0034] Where a range of values is provided, it is understood that each intervening value, to the tenth of the unit of the lower limit unless the context clearly dictates otherwise, between the upper and lower limit of that range and any other stated or intervening value in that stated range, is encompassed within the disclosure. The upper and lower limits of these smaller ranges may independently be included in the smaller ranges, and are also encompassed within the disclosure, subject to any specifically excluded limit in the stated range. Where the stated range includes one or both of the limits, ranges excluding either or both of those included limits are also included in the disclosure.

[0035] Certain ranges are presented herein with numerical values being preceded by the term “about.” The term “about” is used herein to provide literal support for the exact number that it precedes, as well as a number that is near to or approximately the number that the term precedes. In determining whether a number is near to or approximately a specifically recited number, the near or approximating unrecited number may be a number which, in the context in which it is presented, provides the substantial equivalent of the specifically recited number.

[0036] “Percent (%) sequence identity” or “Percent (%) identity” with respect to the nucleic acid sequences identified herein is defined as the percentage of nucleic acid in a candidate sequence that are identical with the nucleic acid sequence being compared, after aligning the sequences considering any conservative substitutions as part of the sequence identity.

[0037] All ranges disclosed herein also encompass any and all possible sub-ranges and combinations of sub-ranges thereof. Any listed range can be recognized as sufficiently describing and enabling the same range being broken down into at least equal halves, thirds, quarters, fifths, tenths, and so forth. As anon-limiting example, each range discussed herein can be readily broken down into a lower third, middle third and upper third, and the like. As will also be understood by one skilled in the art all language such as “up to,” “at least,” “greater than,” “less than,” and the like include the number recited and refer to ranges which can be subsequently broken down into sub-ranges as discussed above. Finally, as will be understood by one skilled in the art, a range includes each individual member. Thus, for example, a group having 1-3 articles refers to groups having 1, 2, or 3 articles. Similarly, a group having 1-5 articles refers to groups having 1, 2, 3, 4, or 5 articles, and so forth.

[0038] Unless defined otherwise, all technical and scientific terms used herein have the same meaning as commonly understood by one of ordinary skill in the art to which the polynucleic acid molecules, the polynucleic acid molecule conjugates, the pharmaceutical compositions, the methods and other aspects belong.

[0039] As used herein, the term “complementary” indicates a sufficient degree of complementarity between two nucleic acid molecules that bind stably and specifically to avoid nonspecific binding.

[0040] As used herein, the term “polynucleic acid” and the term “polynucleotide” are interchangeably used to refer a chain of nucleotides. The term “nucleotide” includes a sequence “G,” “C,” “A,” “T” and “U” each generally stand for a nucleotide that contains guanine, cytosine, adenine, thymidine and uracil as a base. In some instances, the “nucleotide” can refer to a modified nucleotide (e.g., with modified sugar moiety, modified base, modified internucleotide linkage, or combination thereof, including, but not limited to 2′-modified nucleotide, LNA, ENA, BNA, UNA, GNA etc.) In some instances, the “nucleotide” can refer to a modified nucleotide with a non-canonical base (e.g. including, but not limited to, 2-thiouridine, 2-thiothymidine, inosine, 2-aminopurine, 2,6-diaminopurine, dihydrouridine, 4-thiouridine, 4-thiothymidine, 2-thiocytidine).

[0041] As used herein, a “subject” can be any mammal, including a human and a non-human primate.

[0042] The term “condition,” as used herein, includes diseases, disorders, and susceptibilities. In some cases, the condition is an AGT related disorder or symptoms thereof.

[0043] As used herein, the term “treat,” “treating” or “treatment” of any disease or disorder refers, in one instance, to ameliorating the disease or disorder (i.e., slowing or arresting or reducing the development of the disease or at least one of the clinical symptoms thereof). In another instance, “treat”, “treating” or “treatment” refers to alleviating or ameliorating at least one physical parameter including those which may not be discernible by the patient. In yet another instance, “treat”, “treating” or “treatment” refers to modulating the disease or disorder, either physically, (e.g., stabilization of a discernible symptom), physiologically, (e.g., stabilization of a physical parameter), or both.

[0044] The terms “prevent,” “preventing,” and “prevention,” as used herein, refer to a decrease in the occurrence of pathology of a condition in a subject, who does not have, but is at risk of or susceptible to developing a disease or condition. The prevention may be complete, e.g., the total absence of pathology of a condition in a subject. The prevention may also be partial, such that the occurrence of pathology of a condition in a subject is less than that which would have occurred without the present disclosure.

[0045] “Administering” and its grammatical equivalents as used herein can refer to providing pharmaceutical compositions described herein to a subject or a patient. Conventional methods, known to those of ordinary skill in the art of medicine, can be used to administer the composition to the subject, depending upon the type of disease to be treated or the site of the disease. For example, the composition can be administered, e.g., orally, parenterally, by inhalation spray, topically, rectally, nasally, buccally, vaginally, via an implanted reservoir, or via infusion. One or more such routes can be employed.

[0046] The terms “pharmaceutical composition” and its grammatical equivalents as used herein can refer to a mixture or solution comprising a therapeutically effective amount of an active pharmaceutical ingredient together with one or more pharmaceutically acceptable excipients, carriers, and/or a therapeutic agent to be administered to a subject, e.g., a human in need thereof.

[0047] The term “pharmaceutically acceptable” and its grammatical equivalents as used herein can refer to an attribute of a material which is useful in preparing a pharmaceutical composition that is generally safe, non-toxic, and neither biologically nor otherwise undesirable and is acceptable for veterinary as well as human pharmaceutical use. “Pharmaceutically acceptable” can refer a material, such as a carrier or diluent, which does not abrogate the biological activity or properties of the compound, and is relatively nontoxic, i.e., the material may be administered to a subject without causing undesirable biological effects or interacting in a deleterious manner with any of the components of the pharmaceutical composition in which it is contained.

[0048] A “pharmaceutically acceptable excipient” refers to an excipient that can be administered to a subject, together with an agent, and which does not destroy the pharmacological activity thereof and is nontoxic when administered in doses sufficient to deliver a therapeutic amount of the agent.

[0049] The term “therapeutic agent” can refer to any agent that, when administered to a subject, has a therapeutic, diagnostic, and/or prophylactic effect and/or elicits a desired biological and/or pharmacological effect. Therapeutic agents can also be referred to as “actives” or “active agents.” Such agents include, but are not limited to, cytotoxins, radioactive ions, chemotherapeutic agents, small molecule drugs, proteins, and nucleic acids.

[0050] As used herein, the term “sense strand” can be interchangeably used with the term “passenger strand”, and the term “antisense strand” can be interchangeably used with the term “guide strand”. In some instances, a nucleic acid sequence described herein for a sense strand and a passenger strand can be interchangeably used. Also, in some instances, a nucleic acid sequence described herein for an antisense strand and a guide strand can be interchangeably used.

[0051] As used herein, the term “consecutive sequence” refers to a sequence contains a number of consecutive nucleotides from a reference sequence. For example, if a reference sequence is N₁N₂N₃N₄N₅N₆N₇, a consecutive sequence can be N₁N₂N₃N₄ or N₃N₄N₅N₆, but a sequence of N₁N₃N₄N₅ or N₃N₄N₇ cannot be a consecutive sequence.

[0052] As used herein, the term “negative control” refers to a subject or a cell receiving no treatment or placebo.

[0053] It is appreciated that certain features of the polynucleic acid molecules, and/or polynucleic acid molecule conjugates, pharmaceutical composition comprising the polynucleic acid molecules or the polynucleic acid molecule conjugates, methods and other aspects, which are, for clarity, described in the context of separate embodiments, may also be provided in combination in a single embodiment. Conversely, various features of the polynucleic acid molecules, and/or polynucleic acid molecule conjugates, pharmaceutical composition comprising the polynucleic acid molecules or the polynucleic acid molecule conjugates, methods and other aspects, which are, for brevity, described in the context of a single embodiment, may also be provided separately or in any suitable sub-combination. All combinations of the embodiments are specifically embraced by the present disclosure and are disclosed herein just as if each and every combination was individually and explicitly disclosed, to the extent that such combinations embrace operable processes and/or compositions. In addition, all sub-combinations listed in the embodiments describing such variables are also specifically embraced by the present polynucleic acid molecules, and/or polynucleic acid molecule conjugates, pharmaceutical composition comprising the polynucleic acid molecules or the polynucleic acid molecule conjugates, methods and other aspects and are disclosed herein just as if each and every such sub-combination was individually and explicitly disclosed herein.

### Polynucleic Acid Molecules

### Target Regions of Polynucleic Acid Molecules

[0054] Described herein is a polynucleic acid molecule for modulating expression of AGT gene. In some aspects, the polynucleic acid molecule is a single-stranded nucleic acid molecule that hybridizes to certain regions of mRNA. In some aspects, the polynucleic acid molecule is a double-stranded nucleic acid molecule. In some instances, the polynucleic acid molecule comprises a passenger strand (a sense strand) and a guide strand (an antisense strand), and wherein the guide strand hybridizes to certain regions of AGT mRNA.

[0055] In some aspects, the polynucleic acid molecule described herein hybridizes to certain regions of human AGT mRNA. In some aspects, the polynucleic acid molecule described herein hybridizes to certain regions of non-human AGT mRNA.

[0056] In some aspects, the polynucleic acid molecule described herein hybridizes to the 5′ UTR region of human AGT mRNA. In some aspects, the polynucleic acid molecule described herein hybridizes to the coding region of human AGT mRNA. Human AGT gene contains 5 exons and 4 introns. Accordingly, in some aspects, the polynucleic acid molecule described herein hybridizes to the coding region in exon 1 of human AGT mRNA. In some aspects, the polynucleic acid molecule described herein hybridizes to exon 2 of human AGT mRNA. In some aspects, the polynucleic acid molecule described herein hybridizes to exon 3 of human AGT mRNA. In some aspects, the polynucleic acid molecule described herein hybridizes to exon 4 of human AGT mRNA. In some aspects, the polynucleic acid molecule described herein hybridizes to exon 5 of human AGT mRNA. In some aspects, the polynucleic acid molecule described herein hybridizes to the 3′ UTR region of human AGT mRNA. In some aspects, the polynucleic acid molecule described herein hybridizes to human AGT mRNA (NCBI Reference Sequence: NM_001384479.1) with a range of transcription starting sites specified in Table 1, Table 3, or Table 5. In some aspects, the polynucleic acid molecule described herein hybridizes to human AGT mRNA (NCBI Reference Sequence: NM_001384479.1) with a range of transcription starting sites ranging from at least 1, at least 36, at least 100, at least 200, at least 300, at least 400, at least 500, at least 600, at least 700, at least 800, at least 900, at least 1000, at least 1100, at least 1200, at least 1300, at least 1400, at least 1500, at least 1600, at least 1700, at least 1800, at least 1900, at least 2000, at least 2089, or at least 2100.

[0057] In some aspects, the target region that the polynucleic acid molecule described herein hybridizes to is determined by an algorithm that predicts the maximal AGT silencing effectiveness and lowest possible off-target effects. In some specific embodiment, the algorithm is disclosed in He et al., 2017, Scientific Reports, 7, 44836. In some specific embodiment, the algorithm is disclosed in Han et al., 2018, BMC Genomics 19, 669. In some specific embodiment, the algorithm is siRNArules, siRNA-Finder, siRNA Wizard™, siDirect, sirna wizard, Dharmacon siRNA designing tool, White head siRNA designing tool, or Genscript siRNA software.

### Structure of Polynucleic Acid Molecules

### Single-Stranded Nucleic Acid Molecule

[0058] Described herein is a polynucleic acid molecule for modulating expression of AGT gene, wherein the polynucleic acid molecule single-stranded nucleic acid molecule that is reverse complementary to the target region of AGT mRNA as described above.

[0059] In some aspects, the polynucleic acid molecule described herein is not 100% complementary to the target region of AGT mRNA. Accordingly, in some instances, the polynucleic acid molecule described herein is about 95% complementary to the target region of AGT mRNA. In some aspects, the polynucleic acid molecule described herein is about 90% complementary to the target region of AGT mRNA. In some aspects, the polynucleic acid molecule described herein is about 85% complementary to the target region of AGT mRNA. In some aspects, the polynucleic acid molecule described herein is about 80% complementary to the target region of AGT mRNA. In some aspects, the polynucleic acid molecule described herein is about 75% complementary to the target region of AGT mRNA. In some aspects, the polynucleic acid molecule described herein is about 70% complementary to the target region of AGT mRNA.

[0060] In some aspects, the polynucleic acid molecule described herein comprises a nucleic acid sequence in Table 1, Table 3, and Table 5. In other aspects, the polynucleic acid molecule described herein comprises a nucleic acid sequence that is at least 80%, at least 85%, at least 90%, at least 95% identical to a sequence in Table 1, Table 3, Table 5, Table 7, Table 9, Table 11, Table 13, or Table 15. In some instances, the polynucleic acid molecule described herein comprises at least 80%, at least 85%, at least 90%, at least 95% complementary to a nucleic acid sequence selected from SEQ ID NOs:385-576, 897-960, and 1051-1063. In some instances, the polynucleic acid molecule described herein comprises at least 80%, at least 85%, at least 90%, at least 95% complementary to a nucleic acid sequence selected from SEQ ID NOs: 1051-1063.

[0061] In yet other aspects, the polynucleic acid molecule described herein comprises a nucleic acid sequence that is 15 consecutive nucleotides out of the sequences in Table 1, Table 3, Table 5, Table 7, Table 9, Table 11, Table 13, or Table 15 with no more than 2, 3, or 4 mismatches. In some aspects, the polynucleic acid molecule described herein comprises a nucleic acid sequence that is 15 consecutive nucleotides that are complementary to a nucleic acid sequence of SEQ ID NOs: 385-576, 897-960, and 1051-1063 with no more than 2, 3, or 4 mismatches. In yet still other aspects, the polynucleic acid molecule described herein comprises a nucleic acid sequence that is 16 consecutive nucleotides out of the sequences in Table 1, Table 3, Table 5, Table 7, Table 9, Table 11, Table 13, or Table 15 with no more than 2, 3, or 4 mismatches. In some aspects, the polynucleic acid molecule described herein comprises a nucleic acid sequence that is 16 consecutive nucleotides that are complementary to a nucleic acid sequence of SEQ ID NOs: 385-576, 897-960, and 1051-1063 with no more than 2, 3, or 4 mismatches. In yet still other aspects, the polynucleic acid molecule described herein comprises a nucleic acid sequence that is 17 consecutive nucleotides out of the sequences in Table 1, Table 3, Table 5, Table 7, Table 9, Table 11, Table 13, or Table 15 with no more than 2, 3, or 4 mismatches. In some aspects, the polynucleic acid molecule described herein comprises a nucleic acid sequence that is 17 consecutive nucleotides that are complementary to a nucleic acid sequence of SEQ ID NOs: 385-576, 897-960, and 1051-1063 with no more than 2, 3, or 4 mismatches. In yet other aspects, the polynucleic acid molecule described herein comprises a nucleic acid sequence that is 18 consecutive nucleotides out of the sequences in Table 1, Table 3, Table 5, Table 7, Table 9, Table 11, Table 13, or Table 15 with no more than 2, 3, or 4 mismatches. In some aspects, the polynucleic acid molecule described herein comprises a nucleic acid sequence that is 18 consecutive nucleotides that are complementary to a nucleic acid sequence of SEQ ID NOs: 385-576, 897-960, and 1051-1063 with no more than 2, 3, or 4 mismatches. In yet other aspects, the polynucleic acid molecule described herein comprises a nucleic acid sequence that is 19 consecutive nucleotides out of the sequences in Table 1, Table 3, Table 5, Table 7, Table 9, Table 11, Table 13, or Table 15 with no more than 2, 3, or 4 mismatches. In some aspects, the polynucleic acid molecule described herein comprises a nucleic acid sequence that is 19 consecutive nucleotides that are complementary to a nucleic acid sequence of SEQ ID NOs: 385-576, 897-960, and 1051-1063 with no more than 2, 3, or 4 mismatches. In yet other aspects, the polynucleic acid molecule described herein comprises a nucleic acid sequence that is 20 consecutive nucleotides out of the sequences in Table 1, Table 3, Table 5, Table 7, Table 9, Table 11, Table 13, or Table 15 with no more than 2, 3, or 4 mismatches. In some aspects, the polynucleic acid molecule described herein comprises a nucleic acid sequence that is 20 consecutive nucleotides that are complementary to a nucleic acid sequence of SEQ ID NOs: 385-576, 897-960, and 1051-1063 with no more than 2, 3, or 4 mismatches. In yet other aspects, the polynucleic acid molecule described herein comprises a nucleic acid sequence that is 21 consecutive nucleotides out of the sequences in Table 1, Table 3, Table 5, Table 7, Table 9, Table 11, Table 13, or Table 15 with no more than 2, 3, or 4 mismatches. In some aspects, the polynucleic acid molecule described herein comprises a nucleic acid sequence that is 21 consecutive nucleotides that are complementary to a nucleic acid sequence of SEQ ID NOs: 385-576, 897-960, and 1051-1063 with no more than 2, 3, or 4 mismatches. In yet other aspects, the polynucleic acid molecule described herein comprises a nucleic acid sequence that is 22 consecutive nucleotides out of the sequences in Table 1, Table 3, Table 5, Table 7, Table 9, Table 11, Table 13, or Table 15 with no more than 2, 3, or 4 mismatches. In some aspects, the passenger strand described herein comprises a nucleic acid sequence that is 22 consecutive nucleotides that are complementary to a nucleic acid sequence of SEQ ID NOs: 385-576, 897-960, and 1051-1063 with no more than 2, 3, or 4 mismatches.

[0062] In some aspects, the polynucleic acid molecule described herein comprises a nucleic acid sequence that is 15 consecutive nucleotides that are complementary to a nucleic acid sequence of SEQ ID NOs: 1051-1063 with no more than 1, 2, or 3 mismatches. In some aspects, the polynucleic acid molecule described herein comprises a nucleic acid sequence that is 16 consecutive nucleotides that are complementary to a nucleic acid sequence of SEQ ID NOs: 1051-1063 with no more than 1, 2, or 3 mismatches. In some aspects, the polynucleic acid molecule described herein comprises a nucleic acid sequence that is 17 consecutive nucleotides that are complementary to a nucleic acid sequence of SEQ ID NOs: 1051-1063 with no more than 1, 2, or 3 mismatches. In some aspects, the polynucleic acid molecule described herein comprises a nucleic acid sequence that is 18 consecutive nucleotides that are complementary to a nucleic acid sequence of SEQ ID NOs: 1051-1063 with no more than 1, 2, or 3 mismatches. In some aspects, the polynucleic acid molecule described herein comprises a nucleic acid sequence that is 19 consecutive nucleotides that are complementary to a nucleic acid sequence of SEQ ID NOs: 1051-1063 with no more than 1, 2, or 3 mismatches. In some aspects, the polynucleic acid molecule described herein comprises a nucleic acid sequence that is 20 consecutive nucleotides that are complementary to a nucleic acid sequence of SEQ ID NOs: 1051-1063 with no more than 1, 2, or 3 mismatches. In some aspects, the polynucleic acid molecule described herein comprises a nucleic acid sequence that is 21 consecutive nucleotides that are complementary to a nucleic acid sequence of SEQ ID NOs: 1051-1063 with no more than 1, 2, or 3 mismatches. In some aspects, the polynucleic acid molecule described herein comprises a nucleic acid sequence that is 22 consecutive nucleotides that are complementary to a nucleic acid sequence of SEQ ID NOs: 1051-1063 with no more than 1, 2, or 3 mismatches.

[0063] In some aspects, the polynucleic acid molecule described herein comprises about 15-30, 16-30, 17-30, 18-30, 18-27, 18-25, 18-23, 19-23, 20-23, or 21-23 nucleotides in length. In some aspects, the polynucleic acid molecule described herein comprises about 15, 16, 17, 18, 19, 20 nucleotides long. In some aspects, the polynucleic acid molecule described herein comprises about 21, 22, 23, 24, 25 nucleotides long. In some aspects, the polynucleic acid molecule described herein comprises about 26, 27, 28, 29, 30 nucleotides long. In some aspects, the polynucleic acid molecule described herein comprises 19 nucleotides long. In some aspects, the polynucleic acid molecule described herein comprises 21 nucleotides long. In some aspects, the polynucleic acid molecule described herein comprises 23 nucleotides long.

### Double-Stranded Nucleic Acid Molecule

[0064] Described herein is a polynucleic acid molecule for modulating expression of AGT gene, wherein the polynucleic acid molecule is a double-stranded molecule that comprises a passenger strand and a guide strand, and wherein the guide strand is reverse complementary to the target region of AGT mRNA as described above.

[0065] In some aspects, the guide strand described herein is 100% complementary to the target region of AGT mRNA. In some aspects, the guide strand described herein is not 100% complementary to the target region of AGT mRNA. Accordingly, in some instances, the guide strand described herein is about 95% complementary to the target region of AGT mRNA. In some aspects, the guide strand described herein is about 90% complementary to the target region of AGT mRNA. In some aspects, the guide strand described herein is about 85% complementary to the target region of AGT mRNA. In some aspects, the guide strand described herein is about 80% complementary to the target region of AGT mRNA. In some aspects, the guide strand described herein is about 75% complementary to the target region of AGT mRNA. In some aspects, the guide strand described herein is about 70% complementary to the target region of AGT mRNA.

[0066] In some aspects, the polynucleic acid molecule described herein comprises a nucleic acid sequence in Table 1, Table 3, Table 5, Table 7, Table 9, Table 11, Table 13, or Table 15. In other aspects, the polynucleic acid molecule described herein comprises a nucleic acid sequence that is at least 80%, at least 85%, at least 90%, at least 95% identical to a sequence in Table 1, Table 3, Table 5, Table 7, Table 9, Table 11, Table 13, or Table 15. In some instances, the passenger strand described herein comprises at least 80%, at least 85%, at least 90%, at least 95% identical to a nucleic acid sequence selected from SEQ ID NOs:385-576, 897-960, and 1051-1063. In some instances, the guide strand described herein comprises at least 80%, at least 85%, at least 90%, at least 95% identical to a nucleic acid sequence selected from SEQ ID NOs:1-192, 769-832, and 1025-1037. In some instances, the passenger strand described herein comprises at least 80%, at least 85%, at least 90%, at least 95% identical to a nucleic acid sequence selected from SEQ ID NOs: 1051-1063. In some instances, the guide strand described herein comprises at least 80%, at least 85%, at least 90%, at least 95% identical to a nucleic acid sequence selected from SEQ ID NOs: 1025-1037.

[0067] In yet other aspects, the polynucleic acid molecule described herein comprises a nucleic acid sequence that is 14 consecutive nucleotides out of the sequences in Table 1, Table 3, Table 5, Table 7, Table 9, Table 11, Table 13, or Table 15 with no more than 1, 2, 3, or 4 mismatches. In some aspects, the passenger strand described herein comprises a nucleic acid sequence that is 14 consecutive nucleotides of SEQ ID NOs: 385-576, 897-960, and 1051-1063 with no more than 1, 2, 3, or 4 mismatches. In some aspects, the guide strand described herein comprises a nucleic acid sequence that is 14 consecutive nucleotides of SEQ ID NOs: 1-192, 769-832, and 1025-1037 with no more than 1, 2, 3, or 4 mismatches. In yet other aspects, the polynucleic acid molecule described herein comprises a nucleic acid sequence that is 15 consecutive nucleotides out of the sequences in Table 1, Table 3, Table 5, Table 7, Table 9, Table 11, Table 13, or Table 15 with no more than 1, 2, 3, or 4 mismatches. In some aspects, the passenger strand described herein comprises a nucleic acid sequence that is 15 consecutive nucleotides of SEQ ID NOs: 385-576, 897-960, and 1051-1063 with no more than 1, 2, 3, or 4 mismatches. In some aspects, the guide strand described herein comprises a nucleic acid sequence that is 15 consecutive nucleotides of SEQ ID NOs: 1-192, 769-832, and 1025-1037 with no more than 1, 2, 3, or 4 mismatches. In yet still other aspects, the polynucleic acid molecule described herein comprises a nucleic acid sequence that is 16 consecutive nucleotides out of the sequences in Table 1, Table 3, Table 5, Table 7, Table 9, Table 11, Table 13, or Table 15 with no more than 1, 2, 3, or 4 mismatches. In some aspects, the passenger strand described herein comprises a nucleic acid sequence that is 16 consecutive nucleotides of SEQ ID NOs: 385-576, 897-960, and 1051-1063 with no more than 1, 2, 3, or 4 mismatches. In some aspects, the guide strand described herein comprises a nucleic acid sequence that is 16 consecutive nucleotides of SEQ ID NOs: 1-192, 769-832, and 1025-1037 with no more than 1, 2, 3, or 4 mismatches. In yet still other aspects, the polynucleic acid molecule described herein comprises a nucleic acid sequence that is 17 consecutive nucleotides out of the sequences in Table 1, Table 3, Table 5, Table 7, Table 9, Table 11, Table 13, or Table 15 with no more than 1, 2, 3, or 4 mismatches. In some aspects, the passenger strand described herein comprises a nucleic acid sequence that is 17 consecutive nucleotides of SEQ ID NOs: 385-576, 897-960, and 1051-1063 with no more than 1, 2, 3, or 4 mismatches. In some aspects, the guide strand described herein comprises a nucleic acid sequence that is 17 consecutive nucleotides of SEQ ID NOs: 1-192, 769-832, and 1025-1037 with no more than 1, 2, 3, or 4 mismatches. In yet other aspects, the polynucleic acid molecule described herein comprises a nucleic acid sequence that is 18 consecutive nucleotides out of the sequences in Table 1, Table 3, Table 5, Table 7, Table 9, Table 11, Table 13, or Table 15 with no more than 1, 2, 3, or 4 mismatches. In some aspects, the passenger strand described herein comprises a nucleic acid sequence that is 18 consecutive nucleotides of SEQ ID NOs: 385-576, 897-960, and 1051-1063 with no more than 1, 2, 3, or 4 mismatches. In some aspects, the guide strand described herein comprises a nucleic acid sequence that is 18 consecutive nucleotides of SEQ ID NOs: 1-192, 769-832, and 1025-1037 with no more than 1, 2, 3, or 4 mismatches. In yet other aspects, the polynucleic acid molecule described herein comprises a nucleic acid sequence that is 19 consecutive nucleotides out of the sequences in Table 1, Table 3, Table 5, Table 7, Table 9, Table 11, Table 13, or Table 15 with no more than 1, 2, 3, or 4 mismatches. In some aspects, the passenger strand described herein comprises a nucleic acid sequence that is 19 consecutive nucleotides of SEQ ID NOs: 385-576, 897-960, and 1051-1063 with no more than 1, 2, 3, or 4 mismatches. In some aspects, the guide strand described herein comprises a nucleic acid sequence that is 19 consecutive nucleotides of SEQ ID NOs: 1-192, 769-832, and 1025-1037 with no more than 1, 2, 3, or 4 mismatches. In yet other aspects, the polynucleic acid molecule described herein comprises a nucleic acid sequence that is 20 consecutive nucleotides out of the sequences in Table 1, Table 3, Table 5, Table 7, Table 9, Table 11, Table 13, or Table 15 with no more than 1, 2, 3, or 4 mismatches. In some aspects, the passenger strand described herein comprises a nucleic acid sequence that is 20 consecutive nucleotides of SEQ ID NOs: 385-576, 897-960, and 1051-1063 with no more than 1, 2, 3, or 4 mismatches. In some aspects, the guide strand described herein comprises a nucleic acid sequence that is 20 consecutive nucleotides of SEQ ID NOs: 1-192, 769-832, and 1025-1037 with no more than 1, 2, 3, or 4 mismatches. In yet other aspects, the polynucleic acid molecule described herein comprises a nucleic acid sequence that is 21 consecutive nucleotides out of the sequences in Table 1, Table 3, Table 5, Table 7, Table 9, Table 11, Table 13, or Table 15 with no more than 1, 2, 3, or 4 mismatches. In some aspects, the passenger strand described herein comprises a nucleic acid sequence that is 21 consecutive nucleotides of SEQ ID NOs: 385-576, 897-960, and 1051-1063 with no more than 1, 2, 3, or 4 mismatches. In some aspects, the guide strand described herein comprises a nucleic acid sequence that is 21 consecutive nucleotides of SEQ ID NOs: 1-192, 769-832, and 1025-1037 with no more than 1, 2, 3, or 4 mismatches. In yet other aspects, the polynucleic acid molecule described herein comprises a nucleic acid sequence that is 22 consecutive nucleotides out of the sequences in Table 1, Table 3, Table 5, Table 7, Table 9, Table 11, Table 13, or Table 15 with no more than 1, 2, 3, or 4 mismatches. In some aspects, the passenger strand described herein comprises a nucleic acid sequence that is 22 consecutive nucleotides of SEQ ID NOs: 385-576, 897-960, and 1051-1063 with no more than 1, 2, 3, or 4 mismatches. In some aspects, the guide strand described herein comprises a nucleic acid sequence that is 22 consecutive nucleotides of SEQ ID NOs: 1-192, 769-832, and 1025-1037 with no more than 1, 2, 3, or 4 mismatches.

[0068] In some aspects, the passenger strand described herein comprises a nucleic acid sequence that is 14 consecutive nucleotides of SEQ ID NOs: 1051-1063 with no more than 1, 2, or 3 mismatches. In some aspects, the guide strand described herein comprises a nucleic acid sequence that is 14 consecutive nucleotides of SEQ ID NOs: 1025-1037 with no more than 1, 2, or 3 mismatches. In some aspects, the passenger strand described herein comprises a nucleic acid sequence that is 15 consecutive nucleotides of SEQ ID NOs: 1051-1063 with no more than 1, 2, or 3 mismatches. In some aspects, the guide strand described herein comprises a nucleic acid sequence that is 15 consecutive nucleotides of SEQ ID NOs: 1025-1037 with no more than 1, 2, or 3 mismatches. In some aspects, the passenger strand described herein comprises a nucleic acid sequence that is 16 consecutive nucleotides of SEQ ID NOs: 1051-1063 with no more than 1, 2, or 3 mismatches. In some aspects, the guide strand described herein comprises a nucleic acid sequence that is 16 consecutive nucleotides of SEQ ID NOs: 1025-1037 with no more than 1, 2, or 3 mismatches. In some aspects, the passenger strand described herein comprises a nucleic acid sequence that is 17 consecutive nucleotides of SEQ ID NOs: 1051-1063 with no more than 1, 2, or 3 mismatches. In some aspects, the guide strand described herein comprises a nucleic acid sequence that is 17 consecutive nucleotides of SEQ ID NOs: 1025-1037 with no more than 1, 2, or 3 mismatches. In some aspects, the passenger strand described herein comprises a nucleic acid sequence that is 18 consecutive nucleotides of SEQ ID NOs: 1051-1063 with no more than 1, 2, or 3 mismatches. In some aspects, the guide strand described herein comprises a nucleic acid sequence that is 18 consecutive nucleotides of SEQ ID NOs: 1025-1037 with no more than 1, 2, or 3 mismatches. In some aspects, the passenger strand described herein comprises a nucleic acid sequence that is 19 consecutive nucleotides of SEQ ID NOs: 1051-1063 with no more than 1, 2, or 3 mismatches. In some aspects, the guide strand described herein comprises a nucleic acid sequence that is 19 consecutive nucleotides of SEQ ID NOs: 1025-1037 with no more than 1, 2, or 3 mismatches. In some aspects, the passenger strand described herein comprises a nucleic acid sequence that is 20 consecutive nucleotides of SEQ ID NOs: 1051-1063 with no more than 1, 2, or 3 mismatches. In some aspects, the guide strand described herein comprises a nucleic acid sequence that is 20 consecutive nucleotides of SEQ ID NOs: 1025-1037 with no more than 1, 2, or 3 mismatches. In some aspects, the passenger strand described herein comprises a nucleic acid sequence that is 21 consecutive nucleotides of SEQ ID NOs: 1051-1063 with no more than 1, 2, or 3 mismatches. In some aspects, the guide strand described herein comprises a nucleic acid sequence that is 21 consecutive nucleotides of SEQ ID NOs: 1025-1037 with no more than 1, 2, or 3 mismatches. In some aspects, the passenger strand described herein comprises a nucleic acid sequence that is 22 consecutive nucleotides of SEQ ID NOs: 1051-1063 with no more than 1, 2, or 3 mismatches. In some aspects, the guide strand described herein comprises a nucleic acid sequence that is 22 consecutive nucleotides of SEQ ID NOs: 1025-1037 with no more than 1, 2, or 3 mismatches.

[0069] In some aspects, the polynucleic acid molecule described herein comprises a passenger strand and a guide strand of about 15-30, 16-30, 17-30, 18-30, 18-27, 18-25, 18-23, 19-23, 20-23, or 21-23 nucleotides in length. In some aspects, the polynucleic acid molecule described herein comprises a passenger strand and a guide strand of about 15, 16, 17, 18, 19, 20 nucleotides long. In some aspects, the polynucleic acid molecule described herein comprises a passenger strand and a guide strand of about 21, 22, 23, 24, 25 nucleotides long. In some aspects, the polynucleic acid molecule described herein comprises a passenger strand and a guide strand of about 26, 27, 28, 29, 30 nucleotides long. In some aspects, the polynucleic acid molecule described herein comprises a passenger strand of 19 nucleotides long, and a guide strand of about 21 nucleotides long. In some aspects, the polynucleic acid molecule described herein comprises a passenger strand of 21 nucleotides long, and a guide strand of about 23 nucleotides long.

[0070] In some aspects, the passenger strand and the guide strand described herein are reverse complementary to each other and form a duplex with a 3′ overhang on the guide strand. In some aspects, the passenger strand and the guide strand described herein are reverse complementary to each other and form a duplex with a 5′ overhang on the guide strand. In some aspects, the passenger strand and the guide strand described herein are reverse complementary to each other and form a duplex with a 3′ overhang on the passenger strand. In some aspects, the passenger strand and the guide strand described herein are reverse complementary to each other and form a duplex with a 5′ overhang on the passenger strand.

### Modifications of Polynucleic Acid Molecules

[0071] In some aspects, described herein is the polynucleic acid molecule described herein with modifications. In some aspects, the modifications described herein occurs one or more different structures of the polynucleotide acid molecule described herein (e.g., modifications on sugar ring(s), backbone(s), base(s)). In some aspects, the modifications described herein comprise substitutions of one or more nucleotide in the polynucleic acid molecule described herein. In some aspects, different percentages of the polynucleic acid molecule described herein comprise the modifications described herein. In some aspects, different positions of the polynucleic acid molecule described herein comprise the modifications described herein. WO/2018/035380 is herein incorporated by reference in its entirety.

### Types of Modifications

[0072] In some aspects, the polynucleotide acid molecule described herein comprises one or more sugar-modified nucleotide. In some aspects, the sugar-modified nucleotide is a 2′-fluoro modified nucleotide. In some instances, the 2′-fluoro modified nucleotide comprises thio-modified base containing nucleotide, e.g., 2′-fluoro-2-thiouridine-3′-phosphate (U3). In some instances, the sugar-modified nucleotide includes a modification at a 2′ hydroxyl group of the ribose moiety. In some instances, the sugar-modified nucleotide includes modification with an H, OR, R, halo, SH, SR, NH2, NHR, NR2, or CN, wherein R is an alkyl moiety. In some aspects, the sugar-modified nucleotide is a 2′-O-methyl modified nucleotide or 2′-alkoxy modified nucleotide (e.g., 2′-methoxy modified nucleotide). In some instances, 2′ hydroxyl group modification includes 2′-deoxy, 2′-deoxy-2′-fluoro, 2′-O-aminopropyl (2′-O-AP), 2′-O-dimethylaminoethyl (2′-O-DMAOE), 2′-O-dimethylaminopropyl (2′-O-DMAP), 2′-O-dimethylaminoethyloxyethyl (2′-O-DMAEOE), or 2′-O—N-methylacetamido (2′-O-NMA). In some instances, the alkyl moiety comprises a hetero substitution. In some instances, the carbon of the heterocyclic group is substituted by a nitrogen, oxygen or sulfur. In some aspects, the sugar-modified nucleotide is a 2′-amino modified nucleotide. In some aspects, the sugar-modified nucleotide is a 2′-azido modified nucleotide. In some aspects, the sugar-modified nucleotide is a 2′-deoxy modified nucleotide. In some aspects, the sugar-modified nucleotide is a 2′-O-methoxythyl (2′-MOE). In some aspects, the sugar-modified nucleotide is a locked nucleic acid (LNA). In some aspects, the sugar-modified nucleotide is an ethylene-bridged nucleic acid (ENA). In some aspects, the sugar-modified nucleotide is a (S)-constrained ethyl (cEt). In some aspects, the sugar-modified nucleotide is a tricyclo-DNA (tcDNA). In some aspects, the sugar-modified nucleotide is a 2′-NH2 nucleic acid.

[0073] In some aspects, the polynucleotide acid molecule described herein comprises one or more sugarphosphate-modified nucleotide. In some aspects, the modified sugarphosphate is phosphorodiamidate morpholino (PMO). In some aspects, the modified sugarphosphate is phosphoramidate. In some instances, the heterocyclic substitution includes imidazole, and pyrrolidino. In some aspects, the modified sugarphosphate is thiophosphoramidate. In some aspects, the modified sugarphosphate is peptide nucleic acid (PNA).

[0074] In some aspects, the polynucleotide acid molecule described herein comprises one or more backbone-modified nucleotide. In some aspects, the modified backbone is a methylphosphonate. In some aspects, the modified backbone is phosphorothioate. In some aspects, the modified backbone is a guanidinopropyl phosphoramidate. In some aspects, the modified backbone is a mesyl-phosphoramidate (MsPA) linkages. In some instances, the modified backbone comprises one or more of phosphorodithioates, methylphosphonates, 5′-alkylenephosphonates, 5′-methylphosphonate, 3′-alkylene phosphonates, borontrifluoridates, borano phosphate esters and selenophosphates of 3′-5′ linkage or 2′-5′ linkage, phosphotriesters, thionoalkylphosphotriesters, hydrogen phosphonate linkages, alkyl phosphonates, alkylphosphonothioates, arylphosphonothioates, phosphoroselenoates, phosphoramidates.

[0075] In some aspects, the modified nucleotide comprises a modified guanine (e.g., inosine) or one or more of any types of unnatural nucleic acids.

[0076] In some aspects, the modified backbone is phosphorothioate, and the phosphorothioate is a stereochemically enriched phosphorothioate. In certain aspects, the strand contains at least one stereochemically enriched phosphorothioate. In some aspects, the strand comprises at least 1, 2, 3 stereochemically enriched phosphorothioates. In some aspects, the strand comprises only 1, 2, 3, or 4 stereochemically enriched phosphorothioates. In further aspects, at least one (e.g., one or two) stereochemically enriched phosphorothioate is disposed between two consecutive nucleosides that are two of six 5′ end nucleosides of the strand. In yet further aspects, at least one (e.g., one or two) stereochemically enriched phosphorothioate is disposed between two consecutive nucleosides that are two of six 3′ end nucleosides of the strand. In still further aspects, one stereochemically enriched phosphorothioate is covalently bonded to the first nucleoside and the second nucleoside from the 5′ end within the strand. In some aspects, one stereochemically enriched phosphorothioate is covalently bonded to the twenty first nucleoside and the twenty second nucleoside from the 5′ end within the strand. In certain aspects, one stereochemically enriched phosphorothioate is covalently bonded to the twenty second nucleoside and the twenty third nucleoside from the 5′ end within the strand. In particular aspects, the stereochemically enriched phosphorothioate has R_{P} stereochemical identity. In certain aspects, the stereochemically enriched phosphorothioate has S_{P} stereochemical identity.

[0077] In some aspects, the polynucleotide molecules described herein comprises one or more (e.g., from 1 to 20, from 1 to 10, or from 1 to 5) stereochemically enriched (e.g., internucleoside) phosphorothioates (e.g., having diastereomeric excess of at least 10%, at least 50%, at least 60%, at least 70%, at least 80%, or at least 90%, e.g., up to about 99%, for the P-stereogenic center). The polynucleotide molecules described herein comprises one or more (e.g., from 1 to 20, from 1 to 10, or from 1 to 5; e.g., internucleoside) phosphorodithioates. The phosphorodithioates may be non-P-stereogenic in the polynucleotide molecules described herein. Phosphorothioates and phosphorodithioates may enhance the stability of the polynucleotide molecules described herein to exonuclease activity of serum. Non-P-stereogenic phosphorodithioates may simplify the synthesis of the polynucleotide molecule described herein by reducing the number of possible diastereomers. Typically, the phosphorothioate or phosphorodithioate may connect two contiguous nucleosides within the six 3′ end nucleosides and the six 5′ end nucleosides of the polynucleotide molecules described herein. In some aspects, the stereochemically enriched phosphorothioate (e.g., R_{P}-enriched phosphorothioate) may be covalently bonded to the first nucleoside (e.g., the 3′-carbon atom of the first nucleoside) and the second nucleoside (e.g., the 5′-carbon atom of the second nucleoside) from the 5′ end of the guide strand. Additionally or alternatively, the stereochemically enriched phosphorothioate (e.g., S_{P}-enriched phosphorothioate) may be covalently bonded to the 21^{st} nucleoside (e.g., the 3′-carbon atom of the 21^{st} nucleoside) from the 5′ end and the 22^{nd} nucleoside (e.g., the 5′-carbon atom of the 22^{nd} nucleoside) of the guide strand. Further, additionally or alternatively, the stereochemically enriched phosphorothioate (e.g., S_{P}-enriched phosphorothioate or R_{P}-enriched phosphorothioate) may be covalently bonded to the 22^{nd} nucleoside (e.g., the 3′-carbon atom of the 22^{nd} nucleoside) and the 23^{rd} nucleoside (e.g., the 5′-carbon atom of the 23^{rd} nucleoside) from the 5′ end of the guide strand.

Combinations of a 5′ R_{P}-enriched phosphorothioate (e.g., R_{P}-enriched phosphorothioate covalently bonded to the first nucleoside (e.g., the 3′-carbon atom of the first nucleoside) and the second nucleoside (e.g., the 5′-carbon atom of the second nucleoside) from the 5′-end and a 3′ S_{P}-enriched phosphorothioate (e.g., S_{P}-enriched phosphorothioate covalently bonded to the 21^{st} nucleoside (e.g., the 3′-carbon atom of the 21^{st} nucleoside) and the 22^{nd} nucleoside (e.g., the 5′-carbon atom of the 22^{nd} nucleoside) from the 5′-end in an antisense strand can produce superior efficacy and/or duration of action, e.g., as measured by the reduction in the activity of the target relative to a reference guide strand that lacks the combination of a 5′ R_{P}-enriched phosphorothioate and a 3′ S_{P}-enriched phosphorothioate, or a 5′ Rp-enriched phosphorothioate and a 3′ Sp and Rp-enriched phosphorothioate. In some embodiments, the stereochemically enriched phosphorothioate may comprise RₚRₚSₚSₚ (RₚRₚ at the positions 1 and 2 of the guide strand and SₚSₚ at the positions 21 and 22 of the guide strand) or RₚRₚSₚRₚ (RₚRₚ at the positions 1 and 2 of the guide strand and SₚRₚ at the positions 21 and 22 of the guide strand). In some aspects, the polynucleotide molecules described herein comprises four stereochemically enriched phosphorothioates: (1) a Rp-enriched phosphorothioate covalently bonded to the 1^{st} nucleoside (e.g., the 3′-carbon atom of the 1^{st} nucleoside) and the 2^{nd} nucleoside (e.g., the 5′-carbon atom of the 2^{nd} nucleoside) from the 5′-end of the antisense strand; (2) a Rp-enriched phosphorothioate covalently bonded to the 2^{nd} nucleoside (e.g., the 3′-carbon atom of the 2^{nd} nucleoside) and the 3^{rd} nucleoside (e.g., the 5′-carbon atom of the 3^{rd} nucleoside) from the 5′-end of the antisense strand; (3) a Sp-enriched phosphorothioate covalently bonded to the 21^{st} nucleoside (e.g., the 3′-carbon atom of the 21^{st} nucleoside) and the 22^{th} nucleoside (e.g., the 5′-carbon atom of the 22^{th} nucleoside) from the 5′-end of the antisense strand; and (4) a Sp-enriched phosphorothioate covalently bonded to the 22^{th} nucleoside (e.g., the 3′-carbon atom of the 22^{th} nucleoside) and the 23^{rd} nucleoside (e.g., the 5′-carbon atom of the 23^{rd} nucleoside) from the 5′-end of the antisense strand. In some aspects, the polynucleotide molecules described herein comprises four stereochemically enriched phosphorothioates: (1) a Rp-enriched phosphorothioate covalently bonded to the 1^{st} nucleoside (e.g., the 3′-carbon atom of the 1^{st} nucleoside) and the 2^{nd} nucleoside (e.g., the 5′-carbon atom of the 2^{nd} nucleoside) from the 5′-end of the antisense strand; (2) a Rp-enriched phosphorothioate covalently bonded to the 2^{nd} nucleoside (e.g., the 3′-carbon atom of the 2^{nd} nucleoside) and the 3^{rd} nucleoside (e.g., the 5′-carbon atom of the 3^{rd} nucleoside) from the 5′-end of the antisense strand; (3) a Sp-enriched phosphorothioate covalently bonded to the 21^{st} nucleoside (e.g., the 3′-carbon atom of the 21^{st} nucleoside) and the 22^{th} nucleoside (e.g., the 5′-carbon atom of the 22^{th} nucleoside) from the 5′-end of the antisense strand; and (4) a Rp-enriched phosphorothioate covalently bonded to the 22^{th} nucleoside (e.g., the 3′-carbon atom of the 22^{th} nucleoside) and the 23^{rd} nucleoside (e.g., the 5′-carbon atom of the 23^{rd} nucleoside) from the 5′-end of the antisense strand.

[0078] In some aspects, the polynucleotide molecule described herein comprises one or more purine modification. In some aspects, the purine modification described herein is 2,6-diaminopurine. In some aspects, the purine modification described herein is 3-deaza-adenine. In some aspects, the purine modification described herein is 7-deaza-guanine. In some aspects, the purine modification described herein is 8-azido-adenine.

[0079] In some aspects, the polynucleotide molecule described herein comprises one or more pyrimidine modification. In some aspects, the pyrimidine modification described herein is 2-thio-thymidine. In some aspects, the pyrimidine modification described herein is 5-carboxamide-uracil. In some aspects, the pyrimidine modification described herein is 5-methyl-cytosine. In some aspects, the pyrimidine modification described herein is 5-ethynyl uracil.

[0080] In some embodiment, the polynucleic acid molecule described herein comprises an abasic substitution. In those cases where a hybridized polynucleotide construct is contemplated for use as siRNA, a reduction of miRNA-like off-target effects is desirable. The inclusion of one or more (e.g., one or two) abasic substitutions in the hybridized polynucleotide constructs may reduce or even eliminate miRNA-like off-target effects, as the abasic substitutions lack nucleobases that are capable of engaging in base-pairing interactions and alleviate steric hindrance. Thus, the polynucleotide molecule disclosed herein may include one or more (e.g., one or two) abasic substitutions. In some aspects, abasic substitution is at the 5^{th} nucleotide from the 5′ end of the guide strand described herein. In some aspects, abasic substitution is at the 7^{th} nucleotide from the 5′ end of the guide strand described herein.

[0081] When the polynucleotide molecule disclosed herein includes two or more of the abasic substitutions, their structures may be same or different. In certain aspects, a passenger strand contains one abasic substitution (e.g., a guide strand may be free of abasic substitutions). In other aspects, a guide strand contains one abasic substitution (e.g., a passenger strand may be free of abasic substitutions). In yet other aspects, a guide strand contains one abasic substitution, and a passenger strand contains one abasic substitution. In further aspects, a passenger strand includes an abasic substitution between a nucleoside number (x) and a nucleoside number (x+1), where x is an integer from 2 to 7. In yet further aspects, a guide strand includes an abasic substitution between a nucleoside number (x) and a nucleoside number (x+1), where x is an integer from 2 to 7.

[0082] The abasic substitution may be of formula (III):

[chemical structure]

[0083] where
[0084] L is a sugar analogue, or is substituted with a heteroacyl from A, U, C, G, or is any other substituted nucleic acid (e.g., locked or unlocked nucleic acid, glycol nucleic acid, etc.;
[0085] each X⁴ is independently O or S;
[0086] each X⁵ is independently O, S, NH, or a bond;
[0087] each R⁹ is independently H, optionally substituted C₁₋₆ alkyl, optionally substituted C₂₋₆ alkenyl, optionally substituted C₂₋₆ alkynyl, optionally substituted (C₁₋₉ heterocyclyl)-C₁₋₆-alkyl, optionally substituted (C₆₋₁₀ aryl)-C₁₋₆-alkyl, optionally substituted (C₃₋₈ cycloalkyl)-C₁₋₆-alkyl, -LinkA(-T)ₚ, or a conjugation moiety;
[0088] each LinkA is independently a multivalent linker (e.g., including —C(O)—N(H)—);
[0089] each T is independently an auxiliary moiety;
[0090] R¹⁰ is a bond to a 3′-carbon atom of a nucleoside (x) in the strand;
[0091] R¹¹ is a bond to a 5′-oxygen atom of a nucleoside (x+1) in the strand;
[0092] p is an integer from 1 to 6; and
[0093] t is an integer from 1 to 6.

[0094] In some aspects, the abasic substitution described herein is attached to the guide strand of the polynucleic acid molecule described herein. In particular aspects, an abasic substitution (e.g., an internucleotide, abasic spacer of formula (III) in which t is 1) may be included in the guide strand described herein (e.g., within the seed region of the guide strand). In some aspects, an abasic substitution (e.g., an internucleotide, abasic spacer of formula (III) in which t is 1) may be bonded to the 3′ carbon atom of the second, third, fourth, or fifth nucleoside from the 5′ end of the guide strand described herein. In certain aspects, an abasic substitution (e.g., an internucleotide, abasic spacer of formula (III) in which t is 1) may be bonded to the 3′ carbon atom of the thirteenth, fourteenth, fifteenth, or sixteenth nucleoside from the 5′ end of the guide strand described herein. In some aspects, an abasic substitution fourth, fifth, sixth, seventh, eighth, and/or ninth nucleoside from the 5′ end of the guide strand described herein.

[0095] The polynucleotide molecule described herein may contain a strand including a seed region including a hypoxanthine nucleobase-containing nucleoside (e.g., inosine).

[0096] In certain aspects, the hypoxanthine nucleobase-containing nucleoside is a second nucleoside from the 5′ end in the strand. In further aspects, the hypoxanthine nucleobase-containing nucleoside is a third nucleoside from the 5′ end in the strand. In yet further aspects, the hypoxanthine nucleobase-containing nucleoside is a fourth nucleoside from the 5′ end in the strand. In still further aspects, the hypoxanthine nucleobase-containing nucleoside is a fifth nucleoside from the 5′ end in the strand. In particular aspects, the hypoxanthine nucleobase-containing nucleoside is a sixth nucleoside in the strand. In particular aspects, the hypoxanthine nucleobase-containing nucleoside is a seventh nucleoside in the strand.

### Nucleotide Analogue

[0097] In some aspects, the present disclosure provides a polynucleic acid molecule incorporating a nucleotide analogue.

[0098] In some instances, modifications of the nucleotide with the nucleotide analogue described herein can alter base pairings and structural changes of the inhibitory polynucleic acid molecule. In some instances, the nucleotide analogue can be incorporated into the polynucleic acid molecule, thereby suppressing off-target effects. In some instances, the nucleotide analogue can be incorporated into the polynucleic acid molecule, thereby improving stability and efficacy of the polynucleic acid molecule. In some instances, the nucleotide analogue described herein can be incorporated into a guide strand, a passenger strand, or a combination thereof.

[0099] In some instances, the nucleotide analogue can be placed in the polynucleic acid molecule or be a substitute for a nucleotide in the polynucleic acid molecule, thereby suppressing the off-target effects. In some instances, the nucleotide analogue can be substituted for a nucleotide in the polynucleic acid molecule, thereby improving stability and/or efficacy of the polynucleic acid molecule. In some instances, the nucleotide analogue described herein can be placed in a guide strand, a passenger strand, or both.

[0100] In some aspects, the present disclosure provides a polynucleic acid molecule comprising a passenger strand (sense strand) and a guide strand (antisense strand), wherein the guide strand comprises a nucleotide analogue as described herein. In some instances, the nucleotide analogue comprises acyclic L-threoninol nucleic acid-thymine-3′-phosphate (T-T), acyclic L-threoninol nucleic acid-adenine-3′-phosphate (T-A), acyclic N-acetyl L-threoninol abasic nucleic acid-3′phosphate (T-NAc), 1′,2′-Dideoxyribose-3′-phosphate (dAB), thymidine-glycol nucleic acid (GNA) S-isomer (Tgn), 2′-O-methyl-2-thiouridine-3′-phosphate (u3), 2′-fluoro-2-thiouridine-3′-phosphate (U3f), or 2-amino-2′-O-methyladenosine-3′-phosphate (a1). In some instance, the nucleotide analogue is selected from a group consisting of the nucleotide analogue selected from acyclic L-threoninol nucleic acid-thymine-3′-phosphate (T-T), acyclic L-threoninol nucleic acid-adenine-3′-phosphate (T-A), acyclic N-acetyl L-threoninol abasic nucleic acid-3′phosphate (T-NAc), 1′,2′-Dideoxyribose-3′-phosphate (dAB), thymidine-glycol nucleic acid (GNA) S-isomer (Tgn), 2′-O-methyl-2-thiouridine-3′-phosphate (u3), 2′-fluoro-2-thiouridine-3′-phosphate (U3), and 2-amino-2′-O-methyladenosine-3′-phosphate (a1). In some instances, the nucleotide analogue is selected from a group consisting of the nucleotide analogue selected from acyclic L-threoninol nucleic acid-thymine-3′-phosphate (T-T), acyclic L-threoninol nucleic acid-adenine-3′-phosphate (T-A), acyclic N-acetyl L-threoninol abasic nucleic acid-3′phosphate (T-NAc), 1′,2′-Dideoxyribose-3′-phosphate (dAB), thymidine-glycol nucleic acid (GNA) S-isomer (Tgn), 2′-O-methyl-2-thiouridine-3′-phosphate (u3), and 2′-fluoro-2-thiouridine-3′-phosphate (U3f).

[0101] In some instances, the acyclic L-threoninol nucleic acid-3′-phosphate (T-T) has a generic representation shown as below, where the base can be any suitable base or modified base that can make Watson-Crick binding with the base on the opposite strand:

[chemical structure]

[0102] In some instances, the amidite structure of acyclic L-threoninol nucleic acid-thymine-3′-phosphate (T-T) is shown as below:

[chemical structure]

[0103] In some instances, the acyclic L-threoninol nucleic acid-thymine-3′-phosphate (T-T) is incorporated into the polynucleic acid molecule. In some instances, the acyclic L-threoninol nucleic acid-thymine-3′-phosphate (T-T) is incorporated into the siRNA. In some instances, the acyclic L-threoninol nucleic acid-thymine-3′-phosphate (T-T) is incorporated into a guide strand. In some instances, the acyclic L-threoninol nucleic acid-thymine-3′-phosphate (T-T) is incorporated into a passenger strand. In some instances, an incorporated acyclic L-threoninol nucleic acid-thymine-3′-phosphate (T-T) has structure shown as below:

[chemical structure]

[0104] In some instances, the acyclic L-threoninol nucleic acid-thymine-3′-phosphate (T-T) is placed in the polynucleic acid molecule. In some instances, the acyclic L-threoninol nucleic acid-thymine-3′-phosphate (T-T) substitutes one or more nucleotide in siRNA. In some instances, the acyclic L-threoninol nucleic acid-thymine-3′-phosphate (T-T) substitutes one or more nucleotide in a passenger strand and/or a guide strand. In some instances, the acyclic L-threoninol nucleic acid-thymine-3′-phosphate (T-T) substitutes one or more nucleotide in a passenger strand. In some instances, the acyclic L-threoninol nucleic acid-thymine-3′-phosphate (T-T) substitutes one or more nucleotide in a guide strand.

[0105] In some instances, the amidite structure of acyclic L-threoninol nucleic acid-adenine-3′-phosphate (T-A) is shown as below:

[chemical structure]

[0106] In some instances, the acyclic L-threoninol nucleic acid-adenine-3′-phosphate (T-A) is incorporated into the polynucleic acid molecule. In some instances, the acyclic L-threoninol nucleic acid-adenine-3′-phosphate (T-A) is incorporated into the siRNA. In some instances, the acyclic L-threoninol nucleic acid-adenine-3′-phosphate (T-A) is incorporated into a guide strand. In some instances, the acyclic L-threoninol nucleic acid-adenine-3′-phosphate (T-A) is incorporated into a passenger strand. In some instances, an incorporated acyclic L-threoninol nucleic acid-adenine-3′-phosphate (T-A) has structure shown as below:

[chemical structure]

[0107] In some instances, the acyclic L-threoninol nucleic acid-adenine-3′-phosphate (T-A) is placed in the polynucleic acid molecule. In some instances, the acyclic L-threoninol nucleic acid-adenine-3′-phosphate (T-A) substitutes one or more nucleotide in siRNA. In some instances, the acyclic L-threoninol nucleic acid-adenine-3′-phosphate (T-A) substitutes one or more nucleotide in a passenger strand and/or a guide strand. In some instances, the acyclic L-threoninol nucleic acid-adenine-3′-phosphate (T-A) substitutes one or more nucleotide in a passenger strand. In some instances, the acyclic L-threoninol nucleic acid-adenine-3′-phosphate (T-A) substitutes one or more the nucleotide in a guide strand.

[0108] In some instances, the amidite structure of acyclic N-Acetyl L-threoninol abasic nucleic acid-3′-phosphate (T-NAc) is shown as below:

[chemical structure]

[0109] In some instances, the acyclic N-Acetyl L-threoninol abasic nucleic acid-3′-phosphate (T-NAc) is incorporated into the polynucleic acid molecule. In some instances, the acyclic N-Acetyl L-threoninol abasic nucleic acid-3′-phosphate (T-NAc) is incorporated into the siRNA. In some instances, the acyclic N-Acetyl L-threoninol abasic nucleic acid-3′-phosphate (T-NAc) is incorporated into a guide strand. In some instances, the acyclic N-Acetyl L-threoninol abasic nucleic acid-3′-phosphate (T-NAc) is incorporated into a passenger strand. In some instances, an incorporated acyclic N-Acetyl L-threoninol abasic nucleic acid-3′-phosphate (T-NAc) has structure shown as below:

[chemical structure]

[0110] In some instances, the acyclic N-Acetyl L-threoninol abasic nucleic acid-3′-phosphate (T-NAc) is placed in the polynucleic acid molecule. In some instances, the acyclic N-Acetyl L-threoninol abasic nucleic acid-3′-phosphate (T-NAc) substitutes one or more nucleotide in siRNA. In some instances, the acyclic N-Acetyl L-threoninol abasic nucleic acid-3′-phosphate (T-NAc) substitutes one or more nucleotide in a passenger strand and/or a guide strand. In some instances, acyclic N-Acetyl L-threoninol abasic nucleic acid-3′-phosphate (T-NAc) substitutes one or more nucleotide in a passenger strand. In some instances, the acyclic N-Acetyl L-threoninol abasic nucleic acid-3′-phosphate (T-NAc) substitutes one or more nucleotide in a guide strand.

[0111] In some instances, the amidite structure of 1′,2′-Dideoxyribose-3′-phosphate (dAB) is shown as below:

[chemical structure]

[0112] In some instances, the 1′,2′-Dideoxyribose-3′-phosphate (dAB) is incorporated into the polynucleic acid molecule. In some instances, the 1′,2′-Dideoxyribose-3′-phosphate (dAB) is incorporated into the siRNA. In some instances, the 1′,2′-Dideoxyribose-3′-phosphate (dAB) is incorporated into a guide strand. In some instances, the 1′,2′-Dideoxyribose-3′-phosphate (dAB) is incorporated into a passenger strand. In some instances, an incorporated 1′,2′-Dideoxyribose-3′-phosphate (dAB) has structure shown as below:

[chemical structure]

[0113] In some instances, the 1′,2′-Dideoxyribose-3′-phosphate (dAB) is placed in the polynucleic acid molecule. In some instances, the 1′,2′-Dideoxyribose-3′-phosphate (dAB) substitutes one or more nucleotide in siRNA. In some instances, the 1′,2′-Dideoxyribose-3′-phosphate (dAB) substitutes one or more nucleotide in a passenger strand and/or a guide strand. In some instances, the 1′,2′-Dideoxyribose-3′-phosphate (dAB) substitutes one or more nucleotide in a passenger strand. In some instances, the 1′,2′-Dideoxyribose-3′-phosphate (dAB) substitutes one or more nucleotide in a guide strand.

[0114] In some instances, the amidite structure of thymidine-glycol nucleic acid (GNA) S-isomer (Tgn) is shown as below:

[chemical structure]

[0115] In some instances, the thymidine-glycol nucleic acid (GNA) S-isomer (Tgn) is incorporated into the polynucleic acid molecule. In some instances, the thymidine-glycol nucleic acid (GNA) S-isomer (Tgn) is incorporated into the siRNA. In some instances, the thymidine-glycol nucleic acid (GNA) S-isomer (Tgn) is incorporated into a guide strand. In some instances, the thymidine-glycol nucleic acid (GNA) S-isomer (Tgn) is incorporated into a passenger strand. In some instances, an incorporated thymidine-glycol nucleic acid (GNA) S-isomer (Tgn) has structure shown as below:

[chemical structure]

[0116] In some instances, the thymidine-glycol nucleic acid (GNA) S-isomer (Tgn) is placed in the polynucleic acid molecule. In some instances, the thymidine-glycol nucleic acid (GNA) S-isomer (Tgn) substitutes one or more nucleotide in siRNA. In some instances, the thymidine-gly col nucleic acid (GNA) S-isomer (Tgn) substitutes one or more nucleotide in a passenger strand and/or a guide strand. In some instances, the thymidine-glycol nucleic acid (GNA) S-isomer (Tgn) substitutes one or more nucleotide in a passenger strand. In some instances, the thymidine-glycol nucleic acid (GNA) S-isomer (Tgn) substitutes one or more nucleotide in a guide strand.

[0117] In some instances, the amidite structure of 2′-O-methyl-2-thiouridine-3′-phosphate (u3) is shown as below:

[chemical structure]

[0118] In some instances, the 2′-O-methyl-2-thiouridine-3′-phosphate (u3) is incorporated into the polynucleic acid molecule. In some instances, the 2′-O-methyl-2-thiouridine-3′-phosphate (u3) is incorporated into the siRNA. In some instances, the 2′-O-methyl-2-thiouridine-3′-phosphate (u3) is incorporated into a guide strand. In some instances, the 2′-O-methyl-2-thiouridine-3′-phosphate (u3) is incorporated into a passenger strand. In some instances, an incorporated 2′-O-methyl-2-thiouridine-3′-phosphate (u3) has structure shown as below:

[chemical structure]

[0119] In some instances, the 2′-O-methyl-2-thiouridine-3′-phosphate (u3) is placed in the polynucleic acid molecule. In some instances, the 2′-O-methyl-2-thiouridine-3′-phosphate (u3) substitutes one or more nucleotide in siRNA. In some instances, the 2′-O-methyl-2-thiouridine-3′-phosphate (u3) substitutes one or more nucleotide in a passenger strand and/or a guide strand. In some instances, the 2′-O-methyl-2-thiouridine-3′-phosphate (u3) substitutes one or more nucleotide in a passenger strand. In some instances, the 2′-O-methyl-2-thiouridine-3′-phosphate (u3) substitutes one or more nucleotide in a guide strand.

[0120] In some instances, the amidite structure of 2′-fluoro-2-thiouridine-3′-phosphate (U3) is shown as below:

[chemical structure]

[0121] In some instances, the 2′-fluoro-2-thiouridine-3′-phosphate (U3) is incorporated into the polynucleic acid molecule. In some instances, the 2′-fluoro-2-thiouridine-3′-phosphate (U3f) is incorporated into the siRNA. In some instances, the 2′-fluoro-2-thiouridine-3′-phosphate (U3) is incorporated into a guide strand. In some instances, the 2′-fluoro-2-thiouridine-3′-phosphate (U3) is incorporated into a passenger strand. In some instances, an incorporated 2′-fluoro-2-thiouridine-3′-phosphate (U3f) has structure shown as below:

[chemical structure]

[0122] In some instances, the 2′-fluoro-2-thiouridine-3′-phosphate (U3f) is placed in the polynucleic acid molecule. In some instances, the 2′-fluoro-2-thiouridine-3′-phosphate (U3f) substitutes one or more nucleotide in siRNA. In some instances, the 2′-fluoro-2-thiouridine-3′-phosphate (U3) substitutes one or more nucleotide in a passenger strand and/or a guide strand. In some instances, the 2′-fluoro-2-thiouridine-3′-phosphate (U3) substitutes one or more the nucleotide in a passenger strand. In some instances, the 2′-fluoro-2-thiouridine-3′-phosphate (U3f) substitutes one or more the nucleotide in a guide strand.

[0123] In some instances, the amidite structure of 2-amino-2′-O-methyladenosine-3′-phosphate (a1) is shown as below:

[chemical structure]

[0124] In some instances, the 2-amino-2′-O-methyladenosine-3′-phosphate (a1) is incorporated into the polynucleic acid molecule. In some instances, the 2-amino-2′-O-methyladenosine-3′-phosphate (a1) is incorporated into the siRNA. In some instances, the 2-amino-2′-O-methyladenosine-3′-phosphate (a1) is incorporated into a guide strand. In some instances, the 2-amino-2′-O-methyladenosine-3′-phosphate (a1) is incorporated into a passenger strand. In some instances, an incorporated 2-amino-2′-O-methyladenosine-3′-phosphate (a1) has structure shown as below:

[chemical structure]

[0125] In some instances, the 2-amino-2′-O-methyladenosine-3′-phosphate (a1) is placed in the polynucleic acid molecule. In some instances, the 2-amino-2′-O-methyladenosine-3′-phosphate (a1) substitutes one or more nucleotide in siRNA. In some instances, the 2-amino-2′-O-methyladenosine-3′-phosphate (a1) substitutes one or more nucleotide in a passenger strand and/or a guide strand. In some instances, the 2-amino-2′-O-methyladenosine-3′-phosphate (a1) substitutes one or more nucleotide in a passenger strand. In some instances, the 2-amino-2′-O-methyladenosine-3′-phosphate (a1) substitutes one or more nucleotide in a guide strand.

[0126] In some instances, the nucleotide analogue comprises hypoxanthine nucleobase-containing nucleoside (e.g., inosine).

### The Amount and Location of Modifications

[0127] In some aspects, the polynucleotide molecule described herein comprises one or more type of modifications as described above. Accordingly, in some aspects, about 10% of the nucleotides from the polynucleotide molecule described herein are modified with one or more type of modifications as described above. In other aspects, about 20% of the nucleotides from the polynucleotide molecule described herein are modified with one or more type of modifications as described above. In other aspects, about 30% of the nucleotides from the polynucleotide molecule described herein are modified with one or more type of modifications as described above. In other aspects, about 40% of the nucleotides from the polynucleotide molecule described herein are modified with one or more type of modifications as described above. In other aspects, about 50% of the nucleotides from the polynucleotide molecule described herein are modified with one or more type of modifications as described above. In other aspects, about 60% of the nucleotides from the polynucleotide molecule described herein are modified with one or more type of modifications as described above. In other aspects, about 70% of the nucleotides from the polynucleotide molecule described herein are modified with one or more type of modifications as described above. In other aspects, about 80% of the nucleotides from the polynucleotide molecule described herein are modified with one or more type of modifications as described above. In other aspects, about 90% of the nucleotides from the polynucleotide molecule described herein are modified with one or more type of modifications as described above. In other aspects, 100% of the nucleotides from the polynucleotide molecule described herein are modified with one or more type of modifications as described above.

[0128] In some aspects, the one or more types of modifications described herein occurs at different positions within the polynucleotide molecule described herein. In some aspects, the one or more types of modifications described herein occurs in the seed region within the polynucleotide molecule described herein. In some aspects, the one or more types of modifications described herein occurs at 3′ end of the polynucleotide molecule described herein. In some aspects, the one or more types of modifications described herein occurs at 5′ end of the polynucleotide molecule described herein. In some aspects, the one or more types of modifications described herein occurs dispersedly within the polynucleotide molecule described herein. In some aspects, the one or more types of modifications described herein occurs in clusters within the polynucleotide molecule described herein.

[0129] In some aspects, the polynucleic acid molecule is modified with a nucleotide analogue described herein by incorporating the nucleotide analogue in a seed region of the guide strand (positions 2-8 from 5′ end of the guide strand). As described herein, “seed region” refers to a region on the polynucleic acid molecule that comprises sequence that is essential for the binding of the polynucleic acid molecule described herein to the target RNA.

[0130] In some instances, the polynucleic acid molecule is modified with a nucleotide analogue described herein at positions 3-8, positions 4-8, positions 5-8, positions 6-8, or positions 7-8 from the 5′ end of the guide strand. In some instances, the polynucleic acid molecule is modified with a nucleotide analogue described herein at position 2, position 3, position 4, position 5, position 6, position 7, position 8, from the 5′ end of the guide strand or combination thereof. In some instances, the polynucleic acid molecule is modified with one, two, three, four, five, six, or seven nucleotide analogues. In some instances, two or more consecutive positions in the guide strand of the polynucleic acid molecule are modified with nucleotide analogues. In some instances, two or more nucleotide analogue modifications can be placed in the polynucleic acid molecule at alternative positions (e.g., positions 3 and 5, positions 4 and 6, positions 5 and 7, etc.).

[0131] In some instances, the polynucleic acid molecule comprises a polynucleic acid molecule. In some instances, the polynucleic acid molecule is an siRNA comprising a guide strand and a passenger strand. In some instances, the nucleotide analogue is located at the seed region of the guide strand at positions 2-8 from the 5′ end. In some instances, the nucleotide analogue is located at at positions 3-8 from the 5′ end. In some instances, the nucleotide analogue is located at positions 4-8 from the 5′ end. In some instances, the nucleotide analogue is located at positions 5-8 from the 5′ end. In some instances, the nucleotide analogue is located at positions 6-8 from the 5′ end. the nucleotide analogue is located at positions 6-7 from the 5′ end. In some instances, the nucleotide analogue is located at positions 7-8 from the 5′ end.

[0132] In some instances, the nucleotide analogue is located at any one of positions 2-8 from the 5′ end of the guide strand. In some instances, the nucleotide analogue is located at any one of positions 3-8 from the 5′ end of the guide strand. In some instances, the nucleotide analogue is located at any one of positions 4-8 from the 5′ end of the guide strand. In some instances, the nucleotide analogue is located at any one of positions 5-8 from the 5′ end of the guide strand. In some instances, the nucleotide analogue is located at any one of positions 6-8 from the 5′ end of the guide strand. In some instances, the nucleotide analogue is located at any one of positions 6-7 from the 5′ end of the guide strand. In some instances, the nucleotide analogue is located at any one of positions 7-8 from the 5′ end of the guide strand.

[0133] In some instances, the nucleotide analogue is located at position 1 from the 5′ end of the guide strand. In some instances, the nucleotide analogue is located at position 2 from the 5′ end of the guide strand. In some instances, the nucleotide analogue is located at position 3 from the 5′ end of the guide strand. In some instances, the nucleotide analogue is located at position 4 from the 5′ end of the guide strand. In some instances, the nucleotide analogue is located at position 5 from the 5′ end of the guide strand. In some instances, the nucleotide analogue is located at position 6 from the 5′ end of the guide strand. In some instances, the nucleotide analogue is located at position 7 from the 5′ end of the guide strand. In some instances, the nucleotide analogue is located at position 8 from the 5′ end of the guide strand. In some instances, the nucleotide analogue is located at position 9 from the 5′ end of the guide strand. In some instances, the nucleotide analogue is located at position 10 from the 5′ end of the guide strand. In some instances, the nucleotide analogue is located at position 11 from the 5′ end of the guide strand. In some instances, the nucleotide analogue is located at position 12 from the 5′ end of the guide strand. In some instances, the nucleotide analogue is located at position 13 from the 5′ end of the guide strand. In some instances, the nucleotide analogue is located at position 14 from the 5′ end of the guide strand.

[0134] In some instances, the nucleotide analogue is located at position 3 from the 5′ end of the guide strand. In some instances, the nucleotide analogue is located at position 3 from the 5′ end of the guide strand, and the guide strand further comprises 2-thiouridine-3′-phosphate nucleotide. In some instances, the nucleotide analogue located at position 3 from the 5′ end of the guide strand, and the guide strand further comprises 2′-O-methyl-2-thiouridine-3′-phosphate (u3). In some instances, the nucleotide analogue is located at position 3 from the 5′ end of the guide strand, and the guide strand further comprises at least one, at least two, at least three, or at least four 2′-F modified nucleotides. In some instances, the nucleotide analogue is located at position 3 from the 5′ end of the guide strand, and the guide strand further comprises 2′-F modified nucleotides at at least one of positions 2, 7, 12, 14, and 16 from the 5′ end. In some instances, the nucleotide analogue is located at position 3 from the 5′ end of the guide strand, and the guide strand further comprises 2′-F modified nucleotides at positions 2, 7, 12, 14, and 16 from the 5′ end.

### Specific Modification Patterns

[0135] In some aspects, described herein is a specific modification pattern for the polynucleic acid molecule which is a double-stranded nucleic acid molecule comprising a passenger strand and a guide strand. In some aspects, the guide strand comprises a 2′-fluoro modified nucleotide in position 2. In some aspects, the guide strand comprises a 2′-fluoro modified nucleotide in position 14. In some aspects, the guide strand comprises 2′-fluoro modified nucleotides in positions 2 and 14. In some aspects, the guide strand comprises a 2′-fluoro modified nucleotide in position 12. In some aspects, the guide strand comprises a 2′-fluoro modified nucleotide in position 16. In other aspects, the guide strand comprises a 2′-fluoro modified nucleotide in position 6. In other aspects, the guide strand comprises a 2′-fluoro modified nucleotide in position 7. In other aspects, the guide strand comprises a 2′-fluoro modified nucleotide in position 8. In other aspects, the guide strand comprises a 2′-fluoro modified nucleotide in position 9. In other aspects, the guide strand comprises a 2′-fluoro modified nucleotide in position 4.

[0136] In some aspects, described herein is a specific modification pattern for the polynucleic acid molecule which is a double-stranded nucleic acid molecule comprising a passenger strand and a guide strand. In some aspects, the passenger strand comprises a 2′-fluoro modified nucleotide in position 9. In some aspects, the passenger strand comprises a 2′-fluoro modified nucleotide in position 11. In some aspects, the passenger strand comprises 2′-fluoro modified nucleotides in positions 9 and 11. In some aspects, the passenger strand comprises a 2′-fluoro modified nucleotide in position 7. In some aspects, the passenger strand comprises a 2′-fluoro modified nucleotide in position 10. In some aspects, the passenger strand comprises 2′-fluoro modified nucleotides in positions 9, 11, and 7. the passenger strand comprises 2′-fluoro modified nucleotides in positions 9 and 11, and 10. the passenger strand comprises 2′-fluoro modified nucleotides in positions 9 and 7. the passenger strand comprises 2′-fluoro modified nucleotides in positions 9 and 10. the passenger strand comprises 2′-fluoro modified nucleotides in positions 9, 11, 7, and 10. In other aspects, the passenger strand comprises a 2′-fluoro modified nucleotide in position 8. In other aspects, the passenger strand comprises a 2′-fluoro modified nucleotide in position 12. In other aspects, the passenger strand comprises a 2′-fluoro modified nucleotide in position 16.

[0137] In some aspects, the passenger strand and the guide strand of the polynucleic acid molecule comprises any combination of two or more 2′-fluoro modified nucleotides at the positions described in the above two paragraphs.

[0138] In some aspects, the guide strand comprises 5′-nNfnnnNfnNfNfnnnnNfnNfnnnnnnn-3′. In some aspects, the guide strand comprises 5′-nNfnnnNfnnnnnnnNfnNfnnnnnnn-3′. In some aspects, the guide strand comprises 5′-nNfnnnnNfnnnnNfnNfnnnnnnnnn-3′. In the modification patterns described above, “Nf” stands for a 2′-fluoro modified nucleotide, and wherein “n” stands for a 2′-O-methyl modified nucleotide.

[0139] In some aspects, the passenger strand comprises 5′-nnnnnnNfnNfnNfnnnnnnnnn-3′. In some aspects, the passenger strand comprises 5′-nnnnnnNfnNfNfNfmnnnnnnnnn-3′. In some aspects, the passenger strand comprises 5′-nnnnnnnnNfNfNfnnnnnnnnnn-3′. In the modification patterns described above, “Nf” stands for a 2′-fluoro modified nucleotide, and wherein “n” stands for a 2′-O-methyl modified nucleotide.

[0140] In some aspects, described herein is a specific modification pattern for the polynucleic acid molecule which is a double-stranded nucleic acid molecule comprising a passenger strand and a guide strand, wherein the passenger strand comprises about twelve 2′-fluoro modified nucleotides and about nine 2′-O-methyl modified nucleotides, and wherein the guide strand comprises about nine 2′-fluoro modified nucleotides and about fourteen 2′-O-methyl modified nucleotides.

[0141] In some aspects, described herein is a specific modification pattern, wherein the passenger strand is fully modified and comprises twelve 2′-fluoro modified nucleotides, nine 2′-O-methyl modified nucleotides, and wherein the guide strand is fully modified and comprises nine 2′-fluoro modified nucleotides and fourteen 2′-O-methyl modified nucleotides.

[0142] In some aspects, described herein is a specific modification pattern, wherein the passenger strand comprises 5′-NfnNfnNfnNfnNfNfNfnNfnNfnNfnNfnNf-3′, wherein the guide strand comprises 5′-nNfnNfnNfnNfnNfnnnNfnNfnNfnNfnnn-3′, wherein “Nf” stands for a 2′-fluoro modified nucleotide, and wherein “n” stands for a 2′-O-methyl modified nucleotide.

[0143] In some aspects, described herein is a specific modification pattern, wherein the passenger strand comprises 5′-NfnNfnNfnNfnNfNfNfnNfnNfnNfnNfnNf-3′, wherein the guide strand comprises 5′-nNfnNfnNfnNfnNfnnnNfnNfnNfnNfnnn-3′, wherein the passenger and/or guide strand comprises one or more phosphorothioate linkage, wherein “Nf” stands for a 2′-fluoro modified nucleotide, and wherein “n” stands for a 2′-O-methyl modified nucleotide. In other aspects, described herein is a specific modification pattern, wherein the passenger strand comprises 5′-NfNfrNfaNfnNfNfNfnNfNNffNfNNfnNf-3′, wherein the guide strand comprises 5′-nNfNfnNfnNfnNfn-nNfnNfnNfnNfnnn-3′, wherein the passenger comprises two phosphorothioate linkages, wherein the guide comprises four phosphorothioate linkages, wherein “Nf” stands for a 2′-fluoro modified nucleotide, and wherein “n” stands for a2′-methyl modified nucleotide.

[0144] In some aspects, described herein is a specific modification pattern, wherein the passenger strand comprises 5′-nsnsnnnnNfnNfnNfnnnnnnnnn-3′, wherein the guide strand comprises 5′-nsNfsnnnnNfnnnnNfnNfnNfnnnnnsnsn-3′, wherein the passenger comprises two phosphorothioate linkages, wherein “s” stands for phosphorothioate linkages, wherein “Nf” stands for a 2′-fluoro modified nucleotide, and wherein “n” stands for a 2′-O-methyl modified nucleotide.

[0145] In some aspects, described herein is a specific modification pattern, wherein the passenger strand and/or guide strand is modified as Type I in Table 17.

TABLE 17
Nucleotide Modification Patterns

| Pattern Name | Pattern |
|---|---|
| Type I for passenger | 5′-NfsnsNfnNfnNfnNfNfNfnNfnNfnNfnNfnNf-3′ |
| strand | |
| Type I for guide strand | 5′-nsNfsnNfnNfnNfnNfnnnNfnNfnNfnNfnsnsn-3′ |
| Type II for passenger | 5′-nsnsnnnnNfnNfNfNfnnnnnnnnnn-3′ |
| strand | |
| Type II for guide | 5′-nsNfsnnnNfnNfNfnnnnNfnNfnnnnnsnsn-3′ |
| strand | |
| Type III for passenger | 5′-nsnsnnnnnnNfnNfnnnnnnnnnn-3′ |
| strand | |
| Type III for guide | 5′-nsNfsnnnnnnnnnNfnNfnnnnnnnsnsn-3′ |
| strand | |
| Type IV for passenger | 5′-nsnsnnnnNfnNfnNfnnnnnnnnnn-3′ |
| strand | |
| Type IV for guide | 5′-nsNfsnnnnnnnnnNfnNfnNfnnnnnsnsn-3′ |
| strand | |
| Type V for passenger | 5′-nsnsnnnnNfnNfnNfnnnnnnnnnn-3′ |
| strand | |
| Type V for guide | 5′-_nsNfsnnnnNfnnnnNfnNfnNfnnnnnsnsn-3′ |
| strand | |
| Type VI for passenger | 5′-nnnnnnNfnNfnNfnnnnnnnnnn-invdN-invdN-3′ |
| strand | |
| Type VII for passenger | 5′-nsnsnnnnNfnNfnNfnnnnnnnnnn-3′ |
| strand | |
| Type VII for guide | 5′-nsNfsnnnnNfnnnnNfnNfnNfnnnnnsnsn-3′ |
| strand | |

Note:
“Nf” stands for a 2′-fluoro modified nucleotide, “n” stands for a 2′-O-methyl modified nucleotide, “s” stands for a 3′-phosphorothioate, “invdN” stands for an inverted deoxy-nucleotide.

[0146] In some aspects, the polynucleotide molecule provided herein comprises a passenger strand from a nucleic acid sequence of SEQ ID NOs: 385-576, 897-960, and 1051-1063 and a guide strand comprises a nucleic acid sequence of SEQ ID NOs: 1-192, 769-832, and 1025-1037. In other aspects, the polynucleotide molecule provided herein comprises a passenger strand from a nucleic acid sequence of SEQ ID NOs: 385-576, 897-960, and 1051-1063, a guide strand comprises a nucleic acid sequence of SEQ ID NOs: 1-192, 769-832, and 1025-1037, and wherein the passenger strand and/or guide strand is modified in Type I modification pattern specified in Table 17. In some aspects, the polynucleotide molecule provided herein comprises a passenger strand from a nucleic acid sequence of SEQ ID NOs: 1051-1063 and a guide strand comprises a nucleic acid sequence of SEQ ID NOs: 1025-1037. In other aspects, the polynucleotide molecule provided herein comprises a passenger strand from a nucleic acid sequence of SEQ ID NOs: 1051-1063, a guide strand comprises a nucleic acid sequence of SEQ ID NOs: 1025-1037, and wherein the passenger strand and/or guide strand is modified in Type I modification pattern specified in Table 17.

[0147] In some aspects, described herein is a specific modification pattern, wherein the passenger strand comprises about four 2′-fluoro modified nucleotides and about seventeen 2′-O-methyl modified nucleotides, and wherein the guide strand comprises about six 2′-fluoro modified nucleotides and about seventeen 2′-O-methyl modified nucleotides.

[0148] In some aspects, described herein is a specific modification pattern, wherein the passenger strand is fully modified and comprises four 2′-fluoro modified nucleotides, seventeen 2′-O-methyl modified nucleotides, and wherein the guide strand is fully modified and comprises six 2′-fluoro modified nucleotides and seventeen 2′-O-methyl modified nucleotides.

[0149] In some aspects, described herein is a specific modification pattern, wherein the passenger strand comprises 5′-nnnnnnNfnNfNfNfnnnnnnnnnn-3′, wherein the guide strand comprises 5′-nNfnnnNfnNfNfnnnnNfnNfnnnnnnn-3′, wherein “Nf” stands for a 2′-fluoro modified nucleotide, and wherein “n” stands for a 2′-O-methyl modified nucleotide.

[0150] In some aspects, described herein is a specific modification pattern, wherein the passenger strand comprises 5′-nnnnnnNfnNfNfNfnnnnnnnnnn-3′, wherein the guide strand comprises 5′-nNfnnnNfnNfNfnnnnNfnNfnnnnnnn-3′, wherein the passenger strand and/or guide strand comprises one or more phosphorothioate linkage, wherein “Nf” stands for a 2′-fluoro modified nucleotide, and wherein “n” stands for a 2′-O-methyl modified nucleotide. In other aspects, described herein is a specific modification pattern, wherein the passenger strand comprises 5′-nnnnnnNfnNfNfNfnnnnnnnnnn-3′, wherein the guide strand comprises 5′-nNfnnnNfnNfNfnnnnNfnNfnnnnnnn-3′, wherein the passenger comprises two phosphorothioate linkages, wherein the guide comprises four phosphorothioate linkages, wherein “Nf” stands for a 2′-fluoro modified nucleotide, and wherein “n” stands for a 2′-O-methyl modified nucleotide.

[0151] In some aspects, described herein is a specific modification pattern, wherein the passenger strand and/or guide strand is modified as Type II in Table 17.

[0152] In some aspects, the polynucleotide molecule provided herein comprises a passenger strand comprising a nucleic acid sequence of SEQ ID NOs: 385-576, 897-960, and 1051-1063, and/or a guide strand comprising a nucleic acid sequence of SEQ ID NOs: 1-192, 769-832, and 1025-1037, and wherein the passenger strand and/or guide strand is modified in Type II modification pattern specified in Table 17. In other aspects, the polynucleotide molecule provided herein comprises a passenger strand comprising a nucleic acid sequence of SEQ ID NOs: 1051-1063, and/or a guide strand comprising a nucleic acid sequence of SEQ ID NOs: 1025-1037, and wherein the passenger strand and/or guide strand is modified in Type II modification pattern specified in Table 17.

[0153] In some aspects, described herein is a specific modification pattern, wherein the passenger strand comprises about two 2′-fluoro modified nucleotides and about nineteen 2′-O-methyl modified nucleotides, and wherein the guide strand comprises about three 2′-fluoro modified nucleotides and about twenty 2′-O-methyl modified nucleotides.

[0154] In some aspects, described herein is a specific modification pattern, wherein the passenger strand is fully modified and comprises two 2′-fluoro modified nucleotides and nineteen 2′-O-methyl modified nucleotides, and wherein the guide strand is fully modified and comprises three 2′-fluoro modified nucleotides and twenty 2′-O-methyl modified nucleotides.

[0155] In some aspects, described herein is a specific modification pattern, wherein the passenger strand comprises 5′-nnnnnnnnNfnNfnnnnnnnnnn-3′, wherein the guide strand comprises 5′-nNfnnnnnnnnnNfnNfnnnnnnnnn-3′, wherein “Nf” stands for a 2′-fluoro modified nucleotide, and wherein “n” stands for a 2′-O-methyl modified nucleotide.

[0156] In some aspects, described herein is a specific modification pattern, wherein the passenger strand comprises 5′-nnnnnnnnNfnNfnnnnnnnnnn-3′, wherein the guide strand comprises 5′-nNfnnnnnnnnnNfnNfnnnnnnnnn-3′, wherein the passenger strand and/or guide strand comprises one or more phosphorothioate linkage, wherein “Nf” stands for a 2′-fluoro modified nucleotide, and wherein “n” stands for a 2′-O-methyl modified nucleotide. In other aspects, described herein is a specific modification pattern, wherein the passenger strand comprises 5′-nnnnnnnnNfnNfnnnnnnnnnn-3′, wherein the guide strand comprises 5′-nNfnnnnnnnnnNfnNfnnnnnnnnn-3′, wherein the passenger strand comprises two phosphorothioate linkages, wherein the guide comprises four phosphorothioate linkages, wherein “Nf” stands for a 2′-fluoro modified nucleotide, and wherein “n” stands for a 2′-O-methyl modified nucleotide.

[0157] In some aspects, described herein is a specific modification pattern, wherein the passenger strand and/or guide strand is modified as Type III in Table 17.

[0158] In some aspects, the polynucleotide molecule provided herein comprises a passenger strand comprising a nucleic acid sequence of SEQ ID NOs: 385-576, 897-960, and 1051-1063, and/or a guide strand comprising a nucleic acid sequence of SEQ ID NOs: 1-192, 769-832, and 1025-1037, and wherein the passenger strand and/or guide strand is modified in Type III modification pattern specified in Table 17. In other aspects, the polynucleotide molecule provided herein comprises a passenger strand comprising a nucleic acid sequence of SEQ ID NOs: 1051-1063, and/or a guide strand comprising a nucleic acid sequence of SEQ ID NOs: 1025-1037, and wherein the passenger strand and/or guide strand is modified in Type III modification pattern specified in Table 17.

[0159] In some aspects, described herein is a specific modification pattern, wherein the passenger strand comprises about three 2′-fluoro modified nucleotides and about eighteen 2′-O-methyl modified nucleotides, and wherein the guide strand comprises about four 2′-fluoro modified nucleotides and about nineteen 2′-O-methyl modified nucleotides.

[0160] In some aspects, described herein is a specific modification pattern, wherein the passenger strand is fully modified and comprises three 2′-fluoro modified nucleotides, eighteen 2′-O-methyl modified nucleotides, and wherein the guide strand is fully modified and comprises four 2′-fluoro modified nucleotides, nineteen 2′-O-methyl modified nucleotides.

[0161] In some aspects, described herein is a specific modification pattern, wherein the passenger strand comprises 5′-nnnnnnNfnNfnNfnnnnnnnnnn-3′, wherein the guide strand comprises 5′-nNfnnnnnnnnnNfnNfnNfnnnnnnn-3′, wherein “Nf” stands for a 2′-fluoro modified nucleotide, and wherein “n” stands for a 2′-O-methyl modified nucleotide.

[0162] In some aspects, described herein is a specific modification pattern, wherein the passenger strand comprises 5′-nnnnnnNfnNfnNfnnnnnnnnnn-3′, wherein the guide strand comprises 5′-nNfnnnnnnnnnNfnNfnNfnnnnnnn-3′, wherein the passenger strand and/or guide strand comprises one or more phosphorothioate linkage, wherein “Nf” stands for a 2′-fluoro modified nucleotide, and wherein “n” stands for a 2′-O-methyl modified nucleotide. In other aspects, described herein is a specific modification pattern, wherein the passenger strand comprises 5′-nnnnnnNfnNfnNfnnnnnnnnnn-3′, wherein the guide strand comprises 5′-nNfnnnnnnnnnNfnNfnNfnnnnnnn-3′, wherein the passenger strand comprises two phosphorothioate linkages, wherein the guide comprises four phosphorothioate linkages, wherein “Nf” stands for a 2′-fluoro modified nucleotide, and wherein “n” stands for a 2′-O-methyl modified nucleotide.

[0163] In some aspects, described herein is a specific modification pattern, wherein the passenger strand and/or guide strand is modified as Type IV in Table 17.

[0164] In some aspects, the polynucleotide molecule provided herein comprises a passenger strand comprising a nucleic acid sequence of SEQ ID NOs: 385-576, 897-960, and 1051-1063, and/or a guide strand comprising a nucleic acid sequence of SEQ ID NOs: 1-192, 769-832, and 1025-1037, and wherein the passenger strand and/or guide strand is modified in Type IV modification pattern specified in Table 17. In other aspects, the polynucleotide molecule provided herein comprises a passenger strand comprising a nucleic acid sequence of SEQ ID NOs: 1051-1063, and/or a guide strand comprising a nucleic acid sequence of SEQ ID NOs: 1025-1037, and wherein the passenger strand and/or guide strand is modified in Type IV modification pattern specified in Table 17.

[0165] In some aspects, described herein is a specific modification pattern, wherein the passenger strand comprises about three 2′-fluoro modified nucleotides and about eighteen 2′-O-methyl modified nucleotides, and wherein the guide strand comprises about five 2′-fluoro modified nucleotides and about eighteen 2′-O-methyl modified nucleotides.

[0166] In some aspects, described herein is a specific modification pattern, wherein the passenger strand is fully modified and comprises three 2′-fluoro modified nucleotides and eighteen 2′-O-methyl modified nucleotides, and wherein the guide strand is fully modified and comprises five 2′-fluoro modified nucleotides, eighteen 2′-O-methyl modified nucleotides.

[0167] In some aspects, described herein is a specific modification pattern, wherein the passenger strand comprises 5′-nnnnnnNfnNfnNfnnnnnnnnnn-3′, wherein the guide strand comprises 5′-nNfnnnnNfnnnnNfnNfnNfnnnnnnn-3′, wherein “Nf” stands for a 2′-fluoro modified nucleotide, and wherein “n” stands for a 2′-O-methyl modified nucleotide.

[0168] In some aspects, described herein is a specific modification pattern, wherein the passenger strand comprises 5′-nnnnnnNfnNfnNfnnnnnnnnnn-3′, wherein the guide strand comprises 5′-nNfnnnnNfnnnnNfnNfnNfnnnnnnn-3′, wherein the passenger strand and/or guide strand comprises one or more phosphorothioate linkage, wherein “Nf” stands for a 2′-fluoro modified nucleotide, and wherein “n” stands for a 2′-O-methyl modified nucleotide. In other aspects, described herein is a specific modification pattern, wherein the passenger strand comprises 5′-nnnnnnNfnNfnNfnnnnnnnnnn-3′, wherein the guide strand comprises 5′-nNfnnnnNfnnnnNfnNfnNfnnnnnnn-3′, wherein the passenger strand comprises two phosphorothioate linkages, wherein the guide comprises four phosphorothioate linkages, wherein “Nf” stands for a 2′-fluoro modified nucleotide, and wherein “n” stands for a 2′-O-methyl modified nucleotide.

[0169] In some aspects, described herein is a specific modification pattern, wherein the passenger strand and/or guide strand is modified as Type V in Table 17.

[0170] In some aspects, the polynucleotide molecule provided herein comprises a passenger strand comprising a nucleic acid sequence of SEQ ID NOs: 385-576, 897-960, and 1051-1063, and/or a guide strand comprising a nucleic acid sequence of SEQ ID NOs: 1-192, 769-832, and 1025-1037, and wherein the passenger strand and/or guide strand is modified in Type V modification pattern specified in Table 17. In other aspects, the polynucleotide molecule provided herein comprises a passenger strand comprising a nucleic acid sequence of SEQ ID NOs: 1051-1063, and/or a guide strand comprising a nucleic acid sequence of SEQ ID NOs: 1025-1037, and wherein the passenger strand and/or guide strand is modified in Type V modification pattern specified in Table 17.

[0171] In some aspects, described herein is a specific modification pattern, wherein the passenger strand comprises about three 2′-fluoro modified nucleotides and about eighteen 2′-O-methyl modified nucleotides, with one or more inverted deoxy-nucleotides on the 3′ end as an overhang.

[0172] In some aspects, described herein is a specific modification pattern, wherein the passenger strand is fully modified and comprises three 2′-fluoro modified nucleotides and eighteen 2′-O-methyl modified nucleotides, with two inverted deoxy-nucleotides on the 3′ end as an overhang.

[0173] In some aspects, described herein is a specific modification pattern, wherein the passenger strand comprises 5′-nnnnnnNfnNfnNfnnnnnnnnnn-invdN-invdN-3′, wherein “Nf” stands for a 2′-fluoro modified nucleotide, wherein “n” stands for a 2′-O-methyl modified nucleotide, and “invdN” stands for an inverted deoxy-nucleotide. In some instances, the invdN is an inverted deoxyl-thymine. In some aspects, the linker conjugated with one or more targeting moieties as shown in Formula (IV″) or (IV′″) is added to the first nucleic acid on the 5′ end. In some aspects, the linker conjugated with one or more GalNAc as shown in Formula (V″) or (V′″) is added to the first nucleic acid on the 5′ end. In some aspects, the modification pattern comprises one or more phosphorothioate linkages. In some aspects, the modification pattern is shown in Formula (VII). In some aspects, the 5′ end modification known in the art is applied to the one or more inverted nucleotides.

[chemical structure]

wherein R is a moiety that corresponds to the sugar modification described herein, in some instances, R is —O-methyl; wherein R′ is thymine, abasic, or others; wherein A is —O or —S; and wherein A′ is —O or —S.

[0174] In some aspects, the polynucleotide molecule provided herein comprises a passenger strand comprising a nucleic acid sequence of SEQ ID NOs: 385-576, 897-960, and 1051-1063, and/or a guide strand comprising a nucleic acid sequence of SEQ ID NOs: 1-192, 769-832, and 1025-1037, and wherein the passenger strand is modified in Type VI modification pattern specified in Table 17 or as described in the preceding paragraph. In other aspects, the polynucleotide molecule provided herein comprises a passenger strand comprising a nucleic acid sequence of SEQ ID NOs: 1051-1063, and/or a guide strand comprising a nucleic acid sequence of SEQ ID NOs: 1025-1037, and wherein the passenger strand is modified in Type VI modification pattern specified in Table 17 or as described in the preceding paragraph.

[0175] Described herein is a polynucleic acid molecule, whose passenger strand comprises a nucleic acid sequence that is at least 80% identical to a nucleic acid sequence selected from SEQ ID NOs: 577-768, 961-1024, and 1064-1076. Described herein is a polynucleic acid molecule, whose passenger strand comprises a nucleic acid sequence that is at least 85% identical to a nucleic acid sequence selected from SEQ ID NOs: 577-768, 961-1024, and 1064-1076. Described herein is a polynucleic acid molecule, whose passenger strand comprises a nucleic acid sequence that is at least 90% identical to a nucleic acid sequence selected from SEQ ID NOs: 577-768, 961-1024, and 1064-1076. Described herein is a polynucleic acid molecule, whose passenger strand comprises a nucleic acid sequence that is at least 95% identical to a nucleic acid sequence selected from SEQ ID NOs: 577-768, 961-1024, and 1064-1076.

[0176] Described herein is a polynucleic acid molecule, which guide strand comprises a nucleic acid sequence that is at least 80% identical to a nucleic acid sequence selected from SEQ ID NOs: 193-384, 833-896, and 1038-1050. Described herein is a polynucleic acid molecule, which guide strand comprises a nucleic acid sequence that is at least 85% identical to a nucleic acid sequence selected from SEQ ID NOs: 193-384, 833-896, and 1038-1050. Described herein is a polynucleic acid molecule, which guide strand comprises a nucleic acid sequence that is at least 90% identical to a nucleic acid sequence selected from SEQ ID NOs: 193-384, 833-896, and 1038-1050. Described herein is a polynucleic acid molecule, which guide strand comprises a nucleic acid sequence that is at least 95% identical to a nucleic acid sequence selected from SEQ ID NOs: 193-384, 833-896, and 1038-1050.

[0177] A polynucleic acid molecule for modulating expression of AGT gene, wherein polynucleic acid molecule comprises a guide strand comprising the nucleotide sequence of a guide strand comprising the nucleotide sequence of usAfsugccAfuauaUfaCfgGfaagccscsa (SEQ ID NO: 1038) and a passenger strand comprising the nucleotide sequence of gsgscuucCfgUfaUfauauggcaua (SEQ ID NO: 1064), where smaller case “n” stands for 2′-O-methyl modified nucleotide, upper case followed with an “f” (i.e., “Nf”) stands for 2′-fluoro modified nucleotide, and “s” stands for 3′-phosphorothioate.

[0178] A polynucleic acid molecule for modulating expression of AGT gene, wherein polynucleic acid molecule comprises a guide strand comprising the nucleotide sequence of a guide strand comprising the nucleotide sequence of usUfsgaacCfugucAfaUfcUfucucasgsc (SEQ ID NO: 1039) and a passenger strand comprising the nucleotide sequence of usgsagaaGfaUfuGfacagguucaa (SEQ ID NO: 1065), where smaller case “n” stands for 2′-O-methyl modified nucleotide, upper case followed with an “f” (i.e., “Nf”) stands for 2′-fluoro modified nucleotide, and “s” stands for 3′-phosphorothioate.

[0179] A polynucleic acid molecule for modulating expression of AGT gene, wherein polynucleic acid molecule comprises a guide strand comprising the nucleotide sequence of a guide strand comprising the nucleotide sequence of usAfsugaaCfcuguCfaAfuCfuucucsasg (SEQ ID NO: 1040) and a passenger strand comprising the nucleotide sequence of gsasgaagAfuUfgAfcagguucaua (SEQ ID NO: 1066), where smaller case “n” stands for 2′-O-methyl modified nucleotide, upper case followed with an “f” (i.e., “Nf”) stands for 2′-fluoro modified nucleotide, and “s” stands for 3′-phosphorothioate.

[0180] A polynucleic acid molecule for modulating expression of AGT gene, wherein polynucleic acid molecule comprises a guide strand comprising the nucleotide sequence of a guide strand comprising the nucleotide sequence of usUfsugagGfgaguUfuUfgCfuggaasasg (SEQ ID NO: 1041) and a passenger strand comprising the nucleotide sequence of ususccagCfaAfaAfcucccucaaa (SEQ ID NO: 1067), where smaller case “n” stands for 2′-O-methyl modified nucleotide, upper case followed with an “f” (i.e., “Nf”) stands for 2′-fluoro modified nucleotide, and “s” stands for 3′-phosphorothioate.

[0181] A polynucleic acid molecule for modulating expression of AGT gene, wherein polynucleic acid molecule comprises a guide strand comprising the nucleotide sequence of a guide strand comprising the nucleotide sequence of usGfsuuucUfucauCfcAfgUfugaggsgsa (SEQ ID NO: 1042) and a passenger strand comprising the nucleotide sequence of cscsucaaCfuGfgAfugaagaaaca (SEQ ID NO: 1068), where smaller case “n” stands for 2′-O-methyl modified nucleotide, upper case followed with an “f” (i.e., “Nf”) stands for 2′-fluoro modified nucleotide, and “s” stands for 3′-phosphorothioate.

[0182] A polynucleic acid molecule for modulating expression of AGT gene, wherein polynucleic acid molecule comprises a guide strand comprising the nucleotide sequence of a guide strand comprising the nucleotide sequence of usAfsuuuuUfgcagGfuUfcAfgcucgsgsu (SEQ ID NO: 1043) and a passenger strand comprising the nucleotide sequence of csgsagcuGfaAfcCfugcaaaaaua (SEQ ID NO: 1069), where smaller case “n” stands for 2′-O-methyl modified nucleotide, upper case followed with an “f” (i.e., “Nf”) stands for 2′-fluoro modified nucleotide, and “s” stands for 3′-phosphorothioate.

[0183] A polynucleic acid molecule for modulating expression of AGT gene, wherein polynucleic acid molecule comprises a guide strand comprising the nucleotide sequence of a guide strand comprising the nucleotide sequence of usAfsuugcUfcaauUfuUfuGfcaggususc (SEQ ID NO: 1044) and a passenger strand comprising the nucleotide sequence of ascscugcAfaAfaAfuugagcaaua (SEQ ID NO: 1070), where smaller case “n” stands for 2′-O-methyl modified nucleotide, upper case followed with an “f” (i.e., “Nf”) stands for 2′-fluoro modified nucleotide, and “s” stands for 3′-phosphorothioate.

[0184] A polynucleic acid molecule for modulating expression of AGT gene, wherein polynucleic acid molecule comprises a guide strand comprising the nucleotide sequence of a guide strand comprising the nucleotide sequence of usUfsacacAfgcaaAfcAfgGfaauggsgsc (SEQ ID NO: 1045) and a passenger strand comprising the nucleotide sequence of cscsauucCfuGfuUfugcuguguaa (SEQ ID NO: 1071), where smaller case “n” stands for 2′-O-methyl modified nucleotide, upper case followed with an “f” (i.e., “Nf”) stands for 2′-fluoro modified nucleotide, and “s” stands for 3′-phosphorothioate.

[0185] A polynucleic acid molecule for modulating expression of AGT gene, wherein polynucleic acid molecule comprises a guide strand comprising the nucleotide sequence of a guide strand comprising the nucleotide sequence of usUfsugauCfauacAfcAfgCfaaacasgsg (SEQ ID NO:1046) and a passenger strand comprising the nucleotide sequence of usgsuuugCfuGfuGfuaugaucaaa (SEQ ID NO: 1072), where smaller case “n” stands for 2′-O-methyl modified nucleotide, upper case followed with an “f” (i.e., “Nf”) stands for 2′-fluoro modified nucleotide, and “s” stands for 3′-phosphorothioate.

[0186] A polynucleic acid molecule for modulating expression of AGT gene, wherein polynucleic acid molecule comprises a guide strand comprising the nucleotide sequence of a guide strand comprising the nucleotide sequence of usAfsaacaCfugguUfcUfuGfccuccscsc (SEQ ID NO: 1047) and a passenger strand comprising the nucleotide sequence of gsgsaggcAfaGfaAfccaguguuua (SEQ ID NO: 1073), where smaller case “n” stands for 2′-O-methyl modified nucleotide, upper case followed with an “f” (i.e., “Nf”) stands for 2′-fluoro modified nucleotide, and “s” stands for 3′-phosphorothioate.

[0187] A polynucleic acid molecule for modulating expression of AGT gene, wherein polynucleic acid molecule comprises a guide strand comprising the nucleotide sequence of a guide strand comprising the nucleotide sequence of usGfsucggUfuggaAfuUfcUfuuuugsgsa (SEQ ID NO: 1048) and a passenger strand comprising the nucleotide sequence of csasaaaaGfaAfuUfccaaccgaca (SEQ ID NO: 1074), where smaller case “n” stands for 2′-O-methyl modified nucleotide, upper case followed with an “f” (i.e., “Nf”) stands for 2′-fluoro modified nucleotide, and “s” stands for 3′-phosphorothioate.

[0188] A polynucleic acid molecule for modulating expression of AGT gene, wherein polynucleic acid molecule comprises a guide strand comprising the nucleotide sequence of a guide strand comprising the nucleotide sequence of usUfsuucaCfaaacAfaGfcUfggucgsgsu (SEQ ID NO: 1049) and a passenger strand comprising the nucleotide sequence of csgsaccaGfcUfuGfuuugugaaaa (SEQ ID NO: 1075), where smaller case “n” stands for 2′-O-methyl modified nucleotide, upper case followed with an “f” (i.e., “Nf”) stands for 2′-fluoro modified nucleotide, and “s” stands for 3′-phosphorothioate.

[0189] A polynucleic acid molecule for modulating expression of AGT gene, wherein polynucleic acid molecule comprises a guide strand comprising the nucleotide sequence of a guide strand comprising the nucleotide sequence of usGfsuuucAfcaaaCfaAfgCfuggucsgsg (SEQ ID NO: 1050) and a passenger strand comprising the nucleotide sequence of gsasccagCfuUfgUfuugugaaaca (SEQ ID NO: 1076), where smaller case “n” stands for 2′-O-methyl modified nucleotide, upper case followed with an “f” (i.e., “Nf”) stands for 2′-fluoro modified nucleotide, and “s” stands for 3′-phosphorothioate.

[0190] A polynucleic acid molecule for modulating expression of AGT gene, wherein polynucleic acid molecule comprises a guide strand comprising the nucleotide sequence of usAfsgaccAfaggaGfaAfaCfggcugscsu (SEQ ID NO: 345) and a passenger strand comprising the nucleotide sequence of csasgccgUfuUfcUfccuuggucua (SEQ ID NO: 729), where smaller case “n” stands for 2′-O-methyl modified nucleotide, upper case followed with an “f” (i.e., “Nf”) stands for 2′-fluoro modified nucleotide, and “s” stands for 3′-phosphorothioate.

[0191] A polynucleic acid molecule for modulating expression of AGT gene, wherein polynucleic acid molecule comprises a guide strand comprising the nucleotide sequence of usGfsucgGf(T-T)uggaAfuUfcUfuuuugsgsa (SEQ ID NO: 2261) and a passenger strand comprising the nucleotide sequence of csasaaaaGfaAfuUfccaaccgaca (SEQ ID NO: 1074), where smaller case “n” stands for 2′-O-methyl modified nucleotide, upper case followed with an “f” (i.e., “Nf”) stands for 2′-fluoro modified nucleotide, “(T-T)” stands for acyclic L-threoninol nucleic acid-thymine-3′-phosphate, and “s” stands for 3′-phosphorothioate.

[0192] A polynucleic acid molecule for modulating expression of AGT gene, wherein polynucleic acid molecule comprises a guide strand comprising the nucleotide sequence of usGfsucggUf(T-NAc)ggaAfuUfcUfuuuugsgsa (SEQ ID NO: 2211) and a passenger strand comprising the nucleotide sequence of csasaaaaGfaAfuUfccgaccgaca (SEQ ID NO: 2233), where smaller case “n” stands for 2′-O-methyl modified nucleotide, upper case followed with an “f” (i.e., “Nf”) stands for 2′-fluoro modified nucleotide, “(T-NAc)” stands for acyclic N-acetyl L-threoninol abasic nucleic acid-3′-phosphate, and “s” stands for 3′-phosphorothioate.

[0193] A polynucleic acid molecule for modulating expression of AGT gene, wherein polynucleic acid molecule comprises a guide strand comprising the nucleotide sequence of usGfsucggUf(T-T)ggaAfuUfcUfuuuugsgsa (SEQ ID NO: 2302) and a passenger strand comprising the nucleotide sequence of csasaaaaGfaAfuUfccaaccgaca (SEQ ID NO: 1074), where smaller case “n” stands for 2′-O-methyl modified nucleotide, upper case followed with an “f” (i.e., “Nf”) stands for 2′-fluoro modified nucleotide, “(T-T)” stands for acyclic L-threoninol nucleic acid-thymine-3′-phosphate, and “s” stands for 3′-phosphorothioate.

[0194] A polynucleic acid molecule for modulating expression of AGT gene, wherein polynucleic acid molecule comprises a guide strand comprising the nucleotide sequence of usGfsucgGf(T-NAc)uggaAfuUfcUfuuuugsgsa (SEQ ID NO: 2303) and a passenger strand comprising the nucleotide sequence of csasaaaaGfaAfuUfccagccgaca (SEQ ID NO: 2232), where smaller case “n” stands for 2′-O-methyl modified nucleotide, upper case followed with an “f” (i.e., “Nf”) stands for 2′-fluoro modified nucleotide, “(T-NAc)” stands for acyclic N-acetyl L-threoninol abasic nucleic acid-3′-phosphate, and “s” stands for 3′-phosphorothioate.

[0195] In one aspect, described herein is a specific modification motif or pattern for the double-stranded inhibitory polynucleic acid molecule comprising a passenger strand and a guide strand.

[0196] In some aspects, the guide strand comprises a nucleotide analogue selected from acyclic L-threoninol nucleic acid-thymine-3′-phosphate (T-T), acyclic L-threoninol nucleic acid-adenine-3′-phosphate (T-A), acyclic N-acetyl L-threoninol abasic nucleic acid-3′phosphate (T-NAc), 1′,2′-Dideoxyribose-3′-phosphate (dAB), thymidine-glycol nucleic acid (GNA) S-isomer (Tgn), 2′-O-methyl-2-thiouridine-3′-phosphate (u3), 2′-fluoro-2-thiouridine-3′-phosphate (U3), or 2-amino-2′-O-methyladenosine-3′-phosphate (a1). In some instance, the nucleotide analogue is selected from a group consisting of the nucleotide analogue selected from acyclic L-threoninol nucleic acid-thymine-3′-phosphate (T-T), acyclic L-threoninol nucleic acid-adenine-3′-phosphate (T-A), acyclic N-acetyl L-threoninol abasic nucleic acid-3′phosphate (T-NAc), 1′,2′-Dideoxyribose-3′-phosphate (dAB), thymidine-glycol nucleic acid (GNA) S-isomer (Tgn), 2′-O-methyl-2-thiouridine-3′-phosphate (u3), 2′-fluoro-2-thiouridine-3′-phosphate (U3), and 2-amino-2′-O-methyladenosine-3′-phosphate (a1). In some instances, the nucleotide analogue is selected from a group consisting of the nucleotide analogue selected from acyclic L-threoninol nucleic acid-thymine-3′-phosphate (T-T), acyclic L-threoninol nucleic acid-adenine-3′-phosphate (T-A), acyclic N-acetyl L-threoninol abasic nucleic acid-3′phosphate (T-NAc), 1′,2′-Dideoxyribose-3′-phosphate (dAB), thymidine-glycol nucleic acid (GNA) S-isomer (Tgn), 2′-O-methyl-2-thiouridine-3′-phosphate (u3), and 2′-fluoro-2-thiouridine-3′-phosphate (U3).

[0197] In some aspects, the guide strand comprises a nucleotide analogue at one of positions 2-8 from the 5′ end, and further comprises a 2′-fluoro modified nucleotide at position 2 from the 5′ end. In some aspects, the guide strand comprises a nucleotide analogue at one of positions 2-8 from the 5′ end, and further comprises a 2′-fluoro modified nucleotide at position 7 from the 5′ end. In some aspects, the guide strand comprises a nucleotide analogue at one of positions 2-8 from the 5′ end, and further comprises 2′-fluoro modified nucleotides at position 12 from the 5′ end. In some aspects, the guide strand comprises a nucleotide analogue at one of positions 2-8 from the 5′ end, and further comprises a 2′-fluoro modified nucleotide at position 14 from the 5′ end. In some aspects, the guide strand comprises a nucleotide analogue at one of positions 2-8 from the 5′ end, and further comprises a 2′-fluoro modified nucleotide at position 16 from the 5′ end. In other aspects, the guide strand comprises a nucleotide analogue at one of positions 2-8 from the 5′ end, and further comprises a 2′-fluoro modified nucleotide at positions 2, 12, 14, 16, or combination thereof from the 5′ end. In other aspects, the guide strand comprises a nucleotide analogue at one of positions 2-8 from the 5′ end, and further comprises a 2′-fluoro modified nucleotide at positions 2, 7, 12, 14, 16, or combination thereof from the 5′ end. In other aspects, the guide strand comprises a nucleotide analogue at one of positions 2-8 from the 5′ end, and further comprises a 2′-fluoro modified nucleotide at at least three of positions 2, 12, 14, and 16 from the 5′ end. In other aspects, the guide strand comprises a nucleotide analogue at one of positions 2-8 from the 5′ end, and further comprises a 2′-fluoro modified nucleotide at at least three of positions 2, 7, 12, 14, and 16 from the 5′ end.

[0198] In some instances, the nucleotide analogue is located at position 6 from the 5′ end of the guide strand. In some instances, the nucleotide analogue is located at position 6 from the 5′ end of the guide strand, and the guide strand further comprises 2′-fluoro (2′-F) modified nucleotides at at least one of positions 2, 7, 12, 14, and 16 from the 5′ end. In some instances, the nucleotide analogue is located at position 6 from the 5′ end of the guide strand, and the guide strand further comprises 2′-fluoro (2′-F) modified nucleotides at at least two of positions 2, 7, 12, 14, and 16 from the 5′ end. In some instances, the nucleotide analogue is located at position 6 from the 5′ end of the guide strand, and the guide strand further comprises 2′-fluoro (2′-F) modified nucleotides at at least three of positions 2, 7, 12, 14, and 16 from the 5′ end. In some instances, the nucleotide analogue is located at position 6 from the 5′ end of the guide strand, and the guide strand further comprises 2′-fluoro (2′-F) modified nucleotides at positions 2, 7, 12, 14, and 16 from the 5′ end.

[0199] In some instances, the nucleotide analogue is located at position 7 from the 5′ end of the guide strand. In some instances, the nucleotide analogue is located at position 7 from the 5′ end of the guide strand, and the guide strand further comprises 2′-fluoro (2′-F) modified nucleotides at at least one of positions 2, 6, 8, 12, 14, and 16 from the 5′ end. In some instances, the nucleotide analogue is located at position 7 from the 5′ end of the guide strand, and the guide strand further comprises 2′-fluoro (2′-F) modified nucleotides at at least one of positions 2, 12, 14, and 16 from the 5′ end. In some instances, the nucleotide analogue is located at position 7 from the 5′ end of the guide strand, and the guide strand further comprises 2′-fluoro (2′-F) modified nucleotides at at least two of positions 2, 12, 14, and 16 from the 5′ end. In some instances, the nucleotide analogue is located at position 7 from the 5′ end of the guide strand, and the guide strand further comprises 2′-fluoro (2′-F) modified nucleotides at at least three of positions 2, 12, 14, and 16 from the 5′ end. In some instances, the nucleotide analogue is located at position 7 from the 5′ end of the guide strand, and the guide strand further comprises 2′-fluoro (2′-F) modified nucleotides at positions 2, 12, 14, and 16 from the 5′ end. In some instances, the nucleotide analogue is located at position 7 from the 5′ end of the guide strand, and the guide strand comprises 2′-F modified nucleotides at positions 2, 6, 12, 14, and 16 from the 5′ end. In some instances, the nucleotide analogue is located at position 7 from the 5′ end of the guide strand, and the guide strand comprises 2′-F modified nucleotides at positions 2, 8, 12, 14, and 16 from the 5′ end.

[0200] In some instances, the nucleotide analogue is located at position 8 from the 5′ end of the guide strand. In some instances, the nucleotide analogue is located at position 8 from the 5′ end of the guide strand, and the guide strand further comprises 2′-fluoro (2′-F) modified nucleotides at at least one of positions 2, 7, 12, 14, and 16 from the 5′ end. In some instances, the nucleotide analogue is located at position 8 from the 5′ end of the guide strand, and the guide strand further comprises 2′-fluoro (2′-F) modified nucleotides at at least two of positions 2, 7, 12, 14, and 16 from the 5′ end. In some instances, the nucleotide analogue is located at position 8 from the 5′ end of the guide strand, and the guide strand further comprises 2′-fluoro (2′-F) modified nucleotides at at least three of positions 2, 7, 12, 14, and 16 from the 5′ end. In some instances, the nucleotide analogue is located at position 8 from the 5′ end of the guide strand, and the guide strand further comprises 2′-fluoro (2′-F) modified nucleotides at positions 2, 7, 12, 14, and 16 from the 5′ end.

[0201] In some instances, the nucleotides of the guide strand comprises DNA or RNA. As described herein, in some instances, the DNA nucleotide comprises an unmodified DNA comprising: an unmodified adenine nucleotide (A), an unmodified guanine nucleotide (G), an unmodified thymine nucleotide (T), or an unmodified cytosine nucleotide (C). As described herein, in some instances, the RNA comprises an unmodified RNA comprising: an unmodified adenine nucleotide (A), an unmodified guanine nucleotide (G), an unmodified uracil nucleotide (U), or an unmodified cytosine nucleotide (C).

[0202] In some instances, the nucleotides of the guide strand comprises the DNA, RNA, nucleotide analogue, 2′-F modified nucleotide, or 2′-O-alkyl modified nucleotide. In some instances, the 2′-O-alkly modified nucleotide comprises 2′-O-methyl modified nucleotides. In some instances, the nucleotides of the guide strand that are not the nucleotide analogue or 2′-F modified nucleotide are selected from DNA nucleotide, RNA nucleotide, and 2′-O-alkly modified nucleotide. In some instances, the nucleotides of the guide strand that are not the nucleotide analogue or 2′-F modified nucleotide are 2′-O-methyl modified nucleotides.

[0203] In some instances, the guide strand comprises at least one, at least two, at least three, at least four, at least five, at least six, at least seven, or at least eight phosphorothioate modified internucleotide linkages. In some instances, the guide strand comprises at least two, at least three, or at least four phosphorothioate modified internucleotide linkages. In some instances, the guide strand comprises at most one, at most two, at most three, at most four, at most five, at most six, at most seven, or at most eight phosphorothioate modified internucleotide linkages. In some instances, the guide strand comprises one, two, three, four, five, six, seven, or eight phosphorothioate modified internucleotide linkages. In some instances, the guide strand comprises from 1 to 8, from 2 to 8, from 3 to 8, from 4 to 8, from 5 to 8, or from 6 to 8 phosphorothioate modified internucleotide linkages. In some instances, the guide strand comprises from 1 to 4, from 2 to 4, or from 3 to 4 phosphorothioate modified internucleotide linkages.

[0204] In some instances, the guide strand comprises one phosphorothioate modified internucleotide linkages at the 5′ end and one phosphorothioate modified internucleotide linkages at the 3′ end. In some instances, the guide strand comprises two phosphorothioate modified internucleotide linkages at the 5′ end and two phosphorothioate modified internucleotide linkages at the 3′ end. In some instances, the guide strand comprises three phosphorothioate modified internucleotide linkages at the 5′ end and three phosphorothioate modified internucleotide linkages at the 3′ end. In some instances, the guide strand comprises four phosphorothioate modified internucleotide linkages at the 5′ end and four phosphorothioate modified internucleotide linkages at the 3′ end.

[0205] In some instances, the guide strand comprises 2′-O-methyl modified nucleotide, 2′-F modified nucleotide, and/or nucleotide analogue described herein. In some instances, the guide strand comprises a nucleic acid sequence of 5′-mFmmmXFmmmmFmFmFmmmmmmm-3′, wherein m is 2′-O-methyl modified nucleotide, F is 2′-fluoro (2′-F) modified nucleotide, and X is selected from acyclic L-threoninol nucleic acid-thymine-3′-phosphate (T-T), acyclic L-threoninol nucleic acid-adenine-3′-phosphate (T-A), acyclic N-acetyl L-threoninol abasic nucleic acid-3′phosphate (T-NAc), 1′,2′-Dideoxyribose-3′-phosphate (dAB), thymidine-glycol nucleic acid (GNA) S-isomer (Tgn), 2′-O-methyl-2-thiouridine-3′-phosphate (u3), 2′-fluoro-2-thiouridine-3′-phosphate (U3f), and 2-amino-2′-O-methyladenosine-3′-phosphate (a1). In some instances, the guide strand comprises a nucleic acid sequence of 5′-mFmmmXFmmmmFmFmFmmmmmmm-3′, wherein m is 2′-O-methyl modified nucleotide, F is 2′-fluoro (2′-F) modified nucleotide, and X is selected from acyclic L-threoninol nucleic acid-thymine-3′-phosphate (T-T), acyclic L-threoninol nucleic acid-adenine-3′-phosphate (T-A), acyclic N-acetyl L-threoninol abasic nucleic acid-3′phosphate (T-NAc), 1′,2′-Dideoxyribose-3′-phosphate (dAB), and thymidine-glycol nucleic acid (GNA) S-isomer (Tgn).

[0206] In some instances, the guide strand comprises a nucleic acid sequence of 5′-mFmmmmXmmmmFmFmFmmmmmmm-3′, wherein m is 2′-O-methyl modified nucleotide, F is 2′-F modified nucleotide, and X is selected from acyclic L-threoninol nucleic acid-thymine-3′-phosphate (T-T), acyclic L-threoninol nucleic acid-adenine-3′-phosphate (T-A), acyclic N-acetyl L-threoninol abasic nucleic acid-3′phosphate (T-NAc), 1′,2′-Dideoxyribose-3′-phosphate (dAB), thymidine-glycol nucleic acid (GNA) S-isomer (Tgn), 2′-O-methyl-2-thiouridine-3′-phosphate (u3), 2′-fluoro-2-thiouridine-3′-phosphate (U3f), and 2-amino-2′-O-methyladenosine-3′-phosphate (a1). In some instances, the guide strand comprises a nucleic acid sequence of 5′-mFmmmmXmmmmFmFmFmmmmmmm-3′, wherein m is 2′-O-methyl modified nucleotide, F is 2′-F modified nucleotide, and X is selected from acyclic L-threoninol nucleic acid-thymine-3′-phosphate (T-T), acyclic L-threoninol nucleic acid-adenine-3′-phosphate (T-A), acyclic N-acetyl L-threoninol abasic nucleic acid-3′phosphate (T-NAc), 1′,2′-Dideoxyribose-3′-phosphate (dAB), and thymidine-glycol nucleic acid (GNA) S-isomer (Tgn).

[0207] In some instances, the guide strand comprises a nucleic acid sequence of 5′-mFmmmFXmmmmFmFmFmmmmmmm-3′, wherein m is 2′-O-methyl modified nucleotide, F is 2′-F modified nucleotide, and X is selected from acyclic L-threoninol nucleic acid-thymine-3′-phosphate (T-T), acyclic L-threoninol nucleic acid-adenine-3′-phosphate (T-A), acyclic N-acetyl L-threoninol abasic nucleic acid-3′phosphate (T-NAc), 1′,2′-Dideoxyribose-3′-phosphate (dAB), thymidine-glycol nucleic acid (GNA) S-isomer (Tgn), 2′-O-methyl-2-thiouridine-3′-phosphate (u3), 2′-fluoro-2-thiouridine-3′-phosphate (U3f), and 2-amino-2′-O-methyladenosine-3′-phosphate (a1). In some instances, the guide strand comprises a nucleic acid sequence of 5′-mFmmmFXmmmmFmFmFmmmmmmm-3′, wherein m is 2′-O-methyl modified nucleotide, F is 2′-F modified nucleotide, and X is selected from acyclic L-threoninol nucleic acid-thymine-3′-phosphate (T-T), acyclic L-threoninol nucleic acid-adenine-3′-phosphate (T-A), acyclic N-acetyl L-threoninol abasic nucleic acid-3′phosphate (T-NAc), 1′,2′-Dideoxyribose-3′-phosphate (dAB), and thymidine-glycol nucleic acid (GNA) S-isomer (Tgn).

[0208] In some instances, the guide strand comprises a nucleic acid sequence of 5′-mFmmmmXFmmmFmFmFmmmmmmm-3′, wherein m is 2′-O-methyl modified nucleotide, F is 2′-F modified nucleotide, and X is selected from acyclic L-threoninol nucleic acid-thymine-3′-phosphate (T-T), acyclic L-threoninol nucleic acid-adenine-3′-phosphate (T-A), acyclic N-acetyl L-threoninol abasic nucleic acid-3′phosphate (T-NAc), 1′,2′-Dideoxyribose-3′-phosphate (dAB), thymidine-glycol nucleic acid (GNA) S-isomer (Tgn), 2′-O-methyl-2-thiouridine-3′-phosphate (u3), 2′-fluoro-2-thiouridine-3′-phosphate (U3f), and 2-amino-2′-O-methyladenosine-3′-phosphate (a1). In some instances, the guide strand comprises a nucleic acid sequence of 5′-mFmmmmXFmmmFmFmFmmmmmmm-3′, wherein m is 2′-O-methyl modified nucleotide, F is 2′-F modified nucleotide, and X is selected from acyclic L-threoninol nucleic acid-thymine-3′-phosphate (T-T), acyclic L-threoninol nucleic acid-adenine-3′-phosphate (T-A), acyclic N-acetyl L-threoninol abasic nucleic acid-3′phosphate (T-NAc), 1′,2′-Dideoxyribose-3′-phosphate (dAB), and thymidine-glycol nucleic acid (GNA) S-isomer (Tgn).

[0209] In some instances, the guide strand comprises a nucleic acid sequence of 5′-mFmmmmFXmmmFmFmFmmmmmmm-3′, wherein m is 2′-O-methyl modified nucleotide, F is 2′-F modified nucleotide, and X is selected from acyclic L-threoninol nucleic acid-thymine-3′-phosphate (T-T), acyclic L-threoninol nucleic acid-adenine-3′-phosphate (T-A), acyclic N-acetyl L-threoninol abasic nucleic acid-3′phosphate (T-NAc), 1′,2′-Dideoxyribose-3′-phosphate (dAB), thymidine-glycol nucleic acid (GNA) S-isomer (Tgn), 2′-O-methyl-2-thiouridine-3′-phosphate (u3), 2′-fluoro-2-thiouridine-3′-phosphate (U3f), and 2-amino-2′-O-methyladenosine-3′-phosphate (a1). In some instances, the guide strand comprises a nucleic acid sequence of 5′-mFmmmmFXmmmFmFmFmmmmmmm-3′, wherein m is 2′-O-methyl modified nucleotide, F is 2′-F modified nucleotide, and X is selected from acyclic L-threoninol nucleic acid-thymine-3′-phosphate (T-T), acyclic L-threoninol nucleic acid-adenine-3′-phosphate (T-A), acyclic N-acetyl L-threoninol abasic nucleic acid-3′phosphate (T-NAc), 1′,2′-Dideoxyribose-3′-phosphate (dAB), and thymidine-glycol nucleic acid (GNA) S-isomer (Tgn).

[0210] In some instances, the guide strand comprises 2′-O-methyl modified nucleotide, 2′-F modified nucleotide, nucleotide analogue described herein, or phophorothioate internucleotide linkage. In some instances, the guide strand comprises one or more phosphorothioate modified internucleotide linkages at the 5′ end and one or more phosphorothioate modified internucleotide linkages at the 3′ end. In some instances, the guide strand comprises two phosphorothioate modified internucleotide linkages at the 5′ end and two phosphorothioate modified internucleotide linkages at the 3′ end. In some instances, the guide strand comprises a nucleic acid sequence of 5′-msFsmmmXFmmmmFmFmFmmmmmsmsm-3′, wherein m is 2′-O-methyl modified nucleotide, F is 2′-F modified nucleotide, s is phophorothioate internucleotide linkage, and X is selected from acyclic L-threoninol nucleic acid-thymine-3′-phosphate (T-T), acyclic L-threoninol nucleic acid-adenine-3′-phosphate (T-A), acyclic N-acetyl L-threoninol abasic nucleic acid-3′phosphate (T-NAc), 1′,2′-Dideoxyribose-3′-phosphate (dAB), thymidine-glycol nucleic acid (GNA) S-isomer (Tgn), 2′-O-methyl-2-thiouridine-3′-phosphate (u3), 2′-fluoro-2-thiouridine-3′-phosphate (U3f), and 2-amino-2′-O-methyladenosine-3′-phosphate (a1). In some instances, the guide strand comprises a nucleic acid sequence of 5′-msFsmmmXFmmmmFmFmFmmmmmsmsm-3′, wherein m is 2′-O-methyl modified nucleotide, F is 2′-F modified nucleotide, s is phophorothioate internucleotide linkage, and X is selected from acyclic L-threoninol nucleic acid-thymine-3′-phosphate (T-T), acyclic L-threoninol nucleic acid-adenine-3′-phosphate (T-A), acyclic N-acetyl L-threoninol abasic nucleic acid-3′phosphate (T-NAc), 1′,2′-Dideoxyribose-3′-phosphate (dAB), and thymidine-glycol nucleic acid (GNA) S-isomer (Tgn).

[0211] In some instances, the guide strand comprises a nucleic acid sequence of 5′-msFsmmmmXmmmmFmFmFmmmmmsmsm-3′, wherein m is 2′-O-methyl modified nucleotide, F is 2′-F modified nucleotide, s is phophorothioate internucleotide linkage, and X is selected from acyclic L-threoninol nucleic acid-thymine-3′-phosphate (T-T), acyclic L-threoninol nucleic acid-adenine-3′-phosphate (T-A), acyclic N-acetyl L-threoninol abasic nucleic acid-3′phosphate (T-NAc), 1′,2′-Dideoxyribose-3′-phosphate (dAB), thymidine-glycol nucleic acid (GNA) S-isomer (Tgn), 2′-O-methyl-2-thiouridine-3′-phosphate (u3), 2′-fluoro-2-thiouridine-3′-phosphate (U3), and 2-amino-2′-O-methyladenosine-3′-phosphate (a1). In some instances, the guide strand comprises a nucleic acid sequence of 5′-msFsmmmmXmmmmFmFmFmmmmmsmsm-3′, wherein m is 2′-O-methyl modified nucleotide, F is 2′-F modified nucleotide, s is phophorothioate internucleotide linkage, and X is selected from acyclic L-threoninol nucleic acid-thymine-3′-phosphate (T-T), acyclic L-threoninol nucleic acid-adenine-3′-phosphate (T-A), acyclic N-acetyl L-threoninol abasic nucleic acid-3′phosphate (T-NAc), 1′,2′-Dideoxyribose-3′-phosphate (dAB), and thymidine-glycol nucleic acid (GNA) S-isomer (Tgn).

[0212] In some instances, the guide strand comprises a nucleic acid sequence of 5′-msFsmmmmFXmmmFmFmFmmmmmsmsm-3′, wherein m is 2′-O-methyl modified nucleotide, F is 2′-F modified nucleotide, s is phophorothioate internucleotide linkage, and X is selected from acyclic L-threoninol nucleic acid-thymine-3′-phosphate (T-T), acyclic L-threoninol nucleic acid-adenine-3′-phosphate (T-A), acyclic N-acetyl L-threoninol abasic nucleic acid-3′phosphate (T-NAc), 1′,2′-Dideoxyribose-3′-phosphate (dAB), thymidine-glycol nucleic acid (GNA) S-isomer (Tgn), 2′-O-methyl-2-thiouridine-3′-phosphate (u3), 2′-fluoro-2-thiouridine-3′-phosphate (U3f), and 2-amino-2′-O-methyladenosine-3′-phosphate (a1). In some instances, the guide strand comprises a nucleic acid sequence of 5′-msFsmmmmFXmmmFmFmFmmmmmsmsm-3′, wherein m is 2′-O-methyl modified nucleotide, F is 2′-F modified nucleotide, s is phophorothioate internucleotide linkage, and X is selected from acyclic L-threoninol nucleic acid-thymine-3′-phosphate (T-T), acyclic L-threoninol nucleic acid-adenine-3′-phosphate (T-A), acyclic N-acetyl L-threoninol abasic nucleic acid-3′phosphate (T-NAc), 1′,2′-Dideoxyribose-3′-phosphate (dAB), and thymidine-glycol nucleic acid (GNA) S-isomer (Tgn).

[0213] In some instances, the nucleotide analogue is located at at least one of positions 2-12 from the 5′ end of the guide strand, and the nucleotide analogue comprises 2′-O-methyl-2-thiouridine-3′-phosphate (u3) or 2′-fluoro-2-thiouridine-3′-phosphate (U3f). In some instances, the nucleotide analogue that is located at position 12 of the 5′ end of the guide strand, and the nucleotide analogue consists of 2′-fluoro-2-thiouridine-3′-phosphate (U3f). In some instances, the nucleotide analogue is located at position 3 of the 5′ end of the guide strand, and the nucleotide analogue comprises 2′-O-methyl-2-thiouridine-3′-phosphate (u3). In some instances, the nucleotide analogue is located at position 3 of the 5′ end of the guide strand, and the nucleotide analogue consists of 2′-O-methyl-2-thiouridine-3′-phosphate (u3). In some instances, the guide strand comprises a nucleic acid sequence of 5′-mFmmmmFXmmmF′mFmFmmmmmmm-3′, where m is 2′-O-methyl modified nucleotide, F is 2′-F modified nucleotide, X is selected from acyclic L-threoninol nucleic acid-thymine-3′-phosphate (T-T), acyclic N-acetyl L-threoninol abasic nucleic acid-3′phosphate (T-NAc), 1′,2′-Dideoxyribose-3′-phosphate (dAB), and thymidine-glycol nucleic acid (GNA) S-isomer (Tgn), and F′ is 2′-fluoro-2-thiouridine-3′-phosphate (U3f). In some instances, the guide strand comprises a nucleic acid sequence of 5′-msFsmmmmFXmmmF′mFmFmmmmmsmsm-3′, where m is 2′-O-methyl modified nucleotide, F is 2′-F modified nucleotide, s is phophorothioate internucleotide linkage, X is selected from acyclic L-threoninol nucleic acid-thymine-3′-phosphate (T-T), acyclic N-acetyl L-threoninol abasic nucleic acid-3′phosphate (T-NAc), 1′,2′-Dideoxyribose-3′-phosphate (dAB), and thymidine-glycol nucleic acid (GNA) S-isomer (Tgn), and F′ is 2′-fluoro-2-thiouridine-3′-phosphate (U3f). In some instances, the guide strand comprises a nucleic acid sequence of 5′-mFXmmmFmmmmFmFmFmmmmmmm-3′, where m is 2′-O-methyl modified nucleotide, F is 2′-F modified nucleotide, and X is 2′-O-methyl-2-thiouridine-3′-phosphate (u3). In some instances, the guide strand comprises a nucleic acid sequence of 5′-msFsXmmmFmmmmFmFmFmmmmmsmsm-3′, where m is 2′-O-methyl modified nucleotide, F is 2′-F modified nucleotide, s is phophorothioate internucleotide linkage, and X is 2′-O-methyl-2-thiouridine-3′-phosphate (u3).

[0214] In some aspects, described herein is a specific modification motif of pattern for the double-stranded polynucleic acid molecule comprising a passenger strand and an guide strand. In some aspects, described herein is a specific modification pattern of the passenger strand.

[0215] In some instances, the passenger strand comprises one or more nucleotide analogue. In some instances, the passenger strand comprises one or more nucleotide analogue at locations opposite to the seed region of the guide strand. In some instances, the passenger strand comprises one or more nucleotide analogue at locations 12-22 from the 5′ end. In some instances, the passenger strand comprises one or more nucleotide analogue at locations 2-10 from the 3′ end. In some instances, the passenger strand comprises one or more 2-amino-2′-O-methyladenosine-3′-phosphate (a1). In some instances, the passenger strand comprises 2-amino-2′-O-methyladenosine-3′-phosphate (a1) at location 11, 12, 13, 14, or 15 from the 5′ end. In some instances, the passenger strand comprises 2-amino-2′-O-methyladenosine-3′-phosphate (a1) at location 13 from the 5′ end. In some instances, the passenger strand comprises 2-amino-2′-O-methyladenosine-3′-phosphate (a1) at location 14 from the 5′ end. In some instances, the passenger strand comprises 2-amino-2′-O-methyladenosine-3′-phosphate (a1) at location 15 from the 5′ end.

[0216] In some instances, the passenger strand comprises at least one, at least two, at least three, at least four, at least five, at least six, at least seven, or at least eight 2′-fluoro (2′-F) modified nucleotides. In some instances, the passenger strand comprises at least two, at least three, or at least four 2′-F modified nucleotides. In some instances, the passenger strand comprises at most one, at most two, at most three, at most four, at most five, at most six, at most seven, or at most eight 2′-fluoro (2′-F) modified nucleotides. In some instances, the passenger strand comprises from one to eight, from two to eight, from three to eight, from four to eight, from five to eight, from six to eight, or from seven to eight 2′-fluoro (2′-F) modified nucleotides. In some instances, the passenger strand comprises one, two, three, four, five, six, seven, or eight 2′-fluoro (2′-F) modified nucleotides. In some instances, the passenger strand comprises one 2′-F modified nucleotides. In some instances, the passenger strand comprises two 2′-F modified nucleotides. In some instances, the passenger strand comprises three 2′-F modified nucleotides. In some instances, the passenger strand comprises four 2′-F modified nucleotides. In some instances, the passenger strand comprises five 2′-F modified nucleotides.

[0217] In some aspects, the passenger strand comprises a 2′-fluoro modified nucleotide at position 7 from the 5′ end. In some aspects, the passenger strand comprises a 2′-fluoro modified nucleotide at position 9 from the 5′ end. In some aspects, the passenger strand comprises 2′-fluoro modified nucleotides at position 11 from the 5′ end. In some aspects, the passenger strand comprises a 2′-fluoro modified nucleotide at at least one of positions 7, 9, and 11 from the 5′ end. In some aspects, the passenger strand comprises a 2′-fluoro modified nucleotide at positions 7, 9, 11, or combination thereof from the 5′ end. In some aspects, the passenger strand comprises a 2′-fluoro modified nucleotide at positions 7, 9, and 11 from the 5′ end.

[0218] In some instances, the nucleotides of the passenger strand comprises DNA nucleotide or RNA nucleotide. As described herein, in some instances, the DNA nucleotide comprises an unmodified DNA nucleotide comprising: an unmodified adenine nucleotide (A), an unmodified guanine nucleotide (G), an unmodified thymine nucleotide (T), or an unmodified cytosine nucleotide (C). As described herein, in some instances, the RNA nucleotide comprises an unmodified RNA nucleotide comprising: an unmodified adenine nucleotide (A), an unmodified guanine nucleotide (G), an unmodified uracil nucleotide (U), or an unmodified cytosine nucleotide (C).

[0219] In some instances, the nucleotides of the passenger strand comprises the DNA nucleotide, RNA nucleotide, nucleotide analogue, 2′-F modified nucleotide, or 2′-O-alkyl modified nucleotide. In some instances, the 2′-O-alkly modified nucleotide comprises 2′-O-methyl modified nucleotides. In some instances, the nucleotides of the passenger strand that are not the nucleotide analogue or 2′-F modified nucleotide are selected from 2′-O-alkyl modified nucleotide, 2′-alkoxy modified nucleotide, 2′-alkyl modified nucleotide, 2′-halo modified nucleotide, DNA nucleotide, RNA nucleotide, ENA, BNA, LNA, and UNA. In some instances, the nucleotides in the passenger strand that are not 2′-F modified nucleotide are 2′-O-methyl modified nucleotides.

[0220] In some instances, the passenger strand comprises at least one, at least two, at least three, at least four, at least five, at least six, at least seven, or at least eight phosphorothioate modified internucleotide linkages. In some instances, the passenger strand comprises at least two, at least three, or at least four phosphorothioate modified internucleotide linkages. In some instances, the passenger strand comprises at least one phosphorothioate modified internucleotide linkage. In some instances, the passenger strand comprises at most one, at most two, at most three, at most four, at most five, at most six, at most seven, or at most eight phosphorothioate modified internucleotide linkages. In some instances, the passenger strand comprises one, two, three, four, five, six, seven, or eight phosphorothioate modified internucleotide linkages. In some instances, the passenger strand comprises from 1 to 8, from 2 to 8, from 3 to 8, from 4 to 8, from 5 to 8, or from 6 to 8 phosphorothioate modified internucleotide linkages. In some instances, the passenger strand comprises from 1 to 4, from 2 to 4, or from 3 to 4 phosphorothioate modified internucleotide linkages.

[0221] In some instances, the passenger strand comprises at least one, at least two, at least three, or at least four phosphorothioate modified internucleotide linkage at the 5′ end. In some instances, the passenger strand comprises at least one phosphorothioate modified internucleotide linkage at the 5′ end. In some instances, the passenger strand comprises at least one, at least two, at least three, or at least four phosphorothioate modified internucleotide linkage at the 3′ end. In some instances, the passenger strand comprises at least one phosphorothioate modified internucleotide linkage at the 3′ end.

[0222] In some instances, the passenger strand comprises one phosphorothioate modified internucleotide linkage at the 5′ end. In some instances, the passenger strand comprises two phosphorothioate modified internucleotide linkage at the 5′ end. In some instances, the passenger strand comprises three phosphorothioate modified internucleotide linkage at the 5′ end. In some instances, the passenger strand comprises four phosphorothioate modified internucleotide linkage at the 5′ end.

[0223] In some instances, the passenger strand comprises one phosphorothioate modified internucleotide linkage at the 3′ end. In some instances, the passenger strand comprises two phosphorothioate modified internucleotide linkage at the 3′ end. In some instances, the passenger strand comprises three phosphorothioate modified internucleotide linkage at the 3′ end. In some instances, the passenger strand comprises four phosphorothioate modified internucleotide linkage at the 3′ end.

[0224] In some instances, the passenger strand comprises one phosphorothioate modified internucleotide linkages at the 5 end and one phosphorothioate modified internucleotide linkages at the 3′ end. In some instances, the passenger strand comprises two phosphorothioate modified internucleotide linkages at the 5′ end and two phosphorothioate modified internucleotide linkages at the 3′ end. In some instances, the passenger strand comprises three phosphorothioate modified internucleotide linkages at the 5′ end and three phosphorothioate modified internucleotide linkages at the 3′ end. In some instances, the passenger strand comprises four phosphorothioate modified internucleotide linkages at the 5′ end and four phosphorothioate modified internucleotide linkages at the 3′ end.

[0225] In some aspects, described herein is a specific modification pattern for a double-stranded polynucleic nucleic acid molecule comprising a passenger strand and an guide strand. In some instances, the guide strand comprises a nucleic acid sequence of mFmmmXFmmmmFmFmFmmmmmmm, and the passenger strand comprises mmmmmmFmFmFmmmmmmmmmm, wherein m is 2′-O-methyl modified nucleotide, F is 2′-F modified nucleotide, and X is selected from acyclic L-threoninol nucleic acid-thymine-3′-phosphate (T-T), acyclic L-threoninol nucleic acid-adenine-3′-phosphate (T-A), acyclic N-acetyl L-threoninol abasic nucleic acid-3′phosphate (T-NAc), 1′,2′-Dideoxyribose-3′-phosphate (dAB), thymidine-glycol nucleic acid (GNA) S-isomer (Tgn), 2′-O-methyl-2-thiouridine-3′-phosphate (u3), 2′-fluoro-2-thiouridine-3′-phosphate (U3f), or 2-amino-2′-O-methyladenosine-3′-phosphate (a1). In some instances, the guide strand comprises a nucleic acid sequence of 5′-mFmmmXFmmmmFmFmFmmmmmmm-3′, and the passenger strand comprises mmmmmmFmFmFmmmmmmmmmm, wherein m is 2′-O-methyl modified nucleotide, F is 2′-F modified nucleotide, and X is selected from acyclic L-threoninol nucleic acid-thymine-3′-phosphate (T-T), acyclic L-threoninol nucleic acid-adenine-3′-phosphate (T-A), acyclic N-acetyl L-threoninol abasic nucleic acid-3′phosphate (T-NAc), 1′,2′-Dideoxyribose-3′-phosphate (dAB), and thymidine-glycol nucleic acid (GNA) S-isomer (Tgn). In some instances, the guide strand comprises a nucleic acid sequence of 5′-mFmmmXFmmmmFmFmFmmmmmmm-3′, and the passenger strand comprises 5′-mmmmmmFmFmFmmX′mmmmmmm-3′, wherein m is 2′-O-methyl modified nucleotide, F is 2′-F modified nucleotide, and X is selected from acyclic L-threoninol nucleic acid-thymine-3′-phosphate (T-T), acyclic L-threoninol nucleic acid-adenine-3′-phosphate (T-A), acyclic N-acetyl L-threoninol abasic nucleic acid-3′phosphate (T-NAc), 1′,2′-Dideoxyribose-3′-phosphate (dAB), and thymidine-glycol nucleic acid (GNA) S-isomer (Tgn), and X′ is 2-amino-2′-O-methyladenosine-3′-phosphate (a1). In some instances, the guide strand comprises a nucleic acid sequence of 5′-mFmmmXFmmmmFmFmFmmmmmmm-3′, and the passenger strand comprises 5′-mmmmmmFmFmFmmmX′mmmmmm-3′, wherein m is 2′-O-methyl modified nucleotide, F is 2′-F modified nucleotide, and X is selected from acyclic L-threoninol nucleic acid-thymine-3′-phosphate (T-T), acyclic L-threoninol nucleic acid-adenine-3′-phosphate (T-A), acyclic N-acetyl L-threoninol abasic nucleic acid-3′phosphate (T-NAc), 1′,2′-Dideoxyribose-3′-phosphate (dAB), and thymidine-glycol nucleic acid (GNA) S-isomer (Tgn), and X′ is 2-amino-2′-O-methyladenosine-3′-phosphate (a1).

[0226] In some instances, the guide strand comprises a nucleic acid sequence of 5′-msFsmmmXFmmmmFmFmFmmmmmsmsm-3′, and the passenger strand comprises 5′-msmsmmmmFmFmFmmmmmmmmmm-3′, wherein m is 2′-O-methyl modified nucleotide, F is 2′-F modified nucleotide, and X is selected from acyclic L-threoninol nucleic acid-thymine-3′-phosphate (T-T), acyclic L-threoninol nucleic acid-adenine-3′-phosphate (T-A), acyclic N-acetyl L-threoninol abasic nucleic acid-3′phosphate (T-NAc), 1′,2′-Dideoxyribose-3′-phosphate (dAB), thymidine-glycol nucleic acid (GNA) S-isomer (Tgn), 2′-O-methyl-2-thiouridine-3′-phosphate (u3), 2′-fluoro-2-thiouridine-3′-phosphate (U3f), or 2-amino-2′-O-methyladenosine-3′-phosphate (a1). In some instances, the guide strand comprises a nucleic acid sequence of 5′-msFsmmmXFmmmmFmFmFmmmmmsmsm-3′, and the passenger strand comprises 5′-msmsmmmmFmFmFmmmmmmmmmm-3′, wherein m is 2′-O-methyl modified nucleotide, F is 2′-F modified nucleotide, and X is selected from acyclic L-threoninol nucleic acid-thymine-3′-phosphate (T-T), acyclic L-threoninol nucleic acid-adenine-3′-phosphate (T-A), acyclic N-acetyl L-threoninol abasic nucleic acid-3′phosphate (T-NAc), 1′,2′-Dideoxyribose-3′-phosphate (dAB), and thymidine-glycol nucleic acid (GNA) S-isomer (Tgn). In some instances, the guide strand comprises a nucleic acid sequence of 5′-msFsmmmXFmmmmFmFmFmmmmmsmsm-3′, and the passenger strand comprises 5′-msmsmmmmFmFmFmmX′mmmmmmm-3′, wherein m is 2′-O-methyl modified nucleotide, F is 2′-F modified nucleotide, and X is selected from acyclic L-threoninol nucleic acid-thymine-3′-phosphate (T-T), acyclic L-threoninol nucleic acid-adenine-3′-phosphate (T-A), acyclic N-acetyl L-threoninol abasic nucleic acid-3′phosphate (T-NAc), 1′,2′-Dideoxyribose-3′-phosphate (dAB), and thymidine-glycol nucleic acid (GNA) S-isomer (Tgn), and X′ is 2-amino-2′-O-methyladenosine-3′-phosphate (a1). In some instances, the guide strand comprises a nucleic acid sequence of 5′-msFsmmmXFmmmmFmFmFmmmmmsmsm-3′, and the passenger strand comprises 5′-msmsmmmmFmFmFmmmX′mmmmmm-3′, wherein m is 2′-O-methyl modified nucleotide, F is 2′-F modified nucleotide, and X is selected from acyclic L-threoninol nucleic acid-thymine-3′-phosphate (T-T), acyclic L-threoninol nucleic acid-adenine-3′-phosphate (T-A), acyclic N-acetyl L-threoninol abasic nucleic acid-3′phosphate (T-NAc), 1′,2′-Dideoxyribose-3′-phosphate (dAB), and thymidine-glycol nucleic acid (GNA) S-isomer (Tgn), and X′ is 2-amino-2′-O-methyladenosine-3′-phosphate (a1).

[0227] In some instances, the guide strand comprises a nucleic acid sequence of 5′-mFmmmmXmmmmFmFmFmmmmmmm-3′, and the passenger strand comprises 5′-mmmmmmFmFmFmmmmmmmmmm-3′, wherein m is 2′-O-methyl modified nucleotide, F is 2′-F modified nucleotide, and X is selected from acyclic L-threoninol nucleic acid-thymine-3′-phosphate (T-T), acyclic L-threoninol nucleic acid-adenine-3′-phosphate (T-A), acyclic N-acetyl L-threoninol abasic nucleic acid-3′phosphate (T-NAc), 1′,2′-Dideoxyribose-3′-phosphate (dAB), thymidine-glycol nucleic acid (GNA) S-isomer (Tgn), 2′-O-methyl-2-thiouridine-3′-phosphate (u3), 2′-fluoro-2-thiouridine-3′-phosphate (U3f), or 2-amino-2′-O-methyladenosine-3′-phosphate (a1). In some instances, the guide strand comprises a nucleic acid sequence of 5′-mFmmmmXmmmmFmFmFmmmmmmm-3′, and the passenger strand comprises 5′-mmmmmmFmFmFmmmmmmmmmm-3′, wherein m is 2′-O-methyl modified nucleotide, F is 2′-F modified nucleotide, and X is selected from acyclic L-threoninol nucleic acid-thymine-3′-phosphate (T-T), acyclic L-threoninol nucleic acid-adenine-3′-phosphate (T-A), acyclic N-acetyl L-threoninol abasic nucleic acid-3′phosphate (T-NAc), 1′,2′-Dideoxyribose-3′-phosphate (dAB), and thymidine-glycol nucleic acid (GNA) S-isomer (Tgn). In some instances, the guide strand comprises a nucleic acid sequence of 5′-mFmmmmXmmmmFmFmFmmmmmmm-3′, and the passenger strand comprises 5′-msmsmmmmFmFmFmmX′mmmmmmm-3′, wherein m is 2′-O-methyl modified nucleotide, F is 2′-F modified nucleotide, and X is selected from acyclic L-threoninol nucleic acid-thymine-3′-phosphate (T-T), acyclic L-threoninol nucleic acid-adenine-3′-phosphate (T-A), acyclic N-acetyl L-threoninol abasic nucleic acid-3′phosphate (T-NAc), 1′,2′-Dideoxyribose-3′-phosphate (dAB), and thymidine-glycol nucleic acid (GNA) S-isomer (Tgn), and X′ is 2-amino-2′-O-methyladenosine-3′-phosphate (a1). In some instances, the guide strand comprises a nucleic acid sequence of 5′-mFmmmmXmmmmFmFmFmmmmmmm-3′, and the passenger strand comprises 5′-msmsmmmmFmFmFmmmX′mmmmmm-3′, wherein m is 2′-O-methyl modified nucleotide, F is 2′-F modified nucleotide, and X is selected from acyclic L-threoninol nucleic acid-thymine-3′-phosphate (T-T), acyclic L-threoninol nucleic acid-adenine-3′-phosphate (T-A), acyclic N-acetyl L-threoninol abasic nucleic acid-3′phosphate (T-NAc), 1′,2′-Dideoxyribose-3′-phosphate (dAB), and thymidine-glycol nucleic acid (GNA) S-isomer (Tgn), and X′ is 2-amino-2′-O-methyladenosine-3′-phosphate (a1).

[0228] In some instances, the guide strand comprises a nucleic acid sequence of 5′-msFsmmmmXmmmmFmFmFmmmmmsmsm-3′, and the passenger strand comprises 5′-msmsmmmmFmFmFmmmmmmmmmm-3′, wherein m is 2′-O-methyl modified nucleotide, F is 2′-F modified nucleotide, s is phosphorothioate internucleotide linkage, and X is selected from acyclic L-threoninol nucleic acid-thymine-3′-phosphate (T-T), acyclic L-threoninol nucleic acid-adenine-3′-phosphate (T-A), acyclic N-acetyl L-threoninol abasic nucleic acid-3′phosphate (T-NAc), 1′,2′-Dideoxyribose-3′-phosphate (dAB), thymidine-glycol nucleic acid (GNA) S-isomer (Tgn), 2′-O-methyl-2-thiouridine-3′-phosphate (u3), 2′-fluoro-2-thiouridine-3′-phosphate (U3f), or 2-amino-2′-O-methyladenosine-3′-phosphate (a1). In some instances, the guide strand comprises a nucleic acid sequence of 5′-msFsmmmmXmmmmFmFmFmmmmmsmsm-3′, and the passenger strand comprises 5′-msmsmmmmFmFmFmmmmmmmmmm-3′, wherein m is 2′-O-methyl modified nucleotide, F is 2′-F modified nucleotide, s is phosphorothioate internucleotide linkage, and X is selected from acyclic L-threoninol nucleic acid-thymine-3′-phosphate (T-T), acyclic L-threoninol nucleic acid-adenine-3′-phosphate (T-A), acyclic N-acetyl L-threoninol abasic nucleic acid-3′phosphate (T-NAc), 1′,2′-Dideoxyribose-3′-phosphate (dAB), and thymidine-glycol nucleic acid (GNA) S-isomer (Tgn). In some instances, the guide strand comprises a nucleic acid sequence of 5′-msFsmmmmXmmmmFmFmFmmmmmsmsm-3′, and the passenger strand comprises 5′-msmsmmmmFmFmFmmX′mmmmmmm-3′, wherein m is 2′-O-methyl modified nucleotide, F is 2′-F modified nucleotide, and X is selected from acyclic L-threoninol nucleic acid-thymine-3′-phosphate (T-T), acyclic L-threoninol nucleic acid-adenine-3′-phosphate (T-A), acyclic N-acetyl L-threoninol abasic nucleic acid-3′phosphate (T-NAc), 1′,2′-Dideoxyribose-3′-phosphate (dAB), and thymidine-glycol nucleic acid (GNA) S-isomer (Tgn), and X′ is 2-amino-2′-O-methyladenosine-3′-phosphate (a1). In some instances, the guide strand comprises a nucleic acid sequence of 5′-msFsmmmmXmmmmFmFmFmmmmmsmsm-3′, and the passenger strand comprises 5′-msmsmmmmFmFmFmmmX′mmmmmm-3′, wherein m is 2′-O-methyl modified nucleotide, F is 2′-F modified nucleotide, and X is selected from acyclic L-threoninol nucleic acid-thymine-3′-phosphate (T-T), acyclic L-threoninol nucleic acid-adenine-3′-phosphate (T-A), acyclic N-acetyl L-threoninol abasic nucleic acid-3′phosphate (T-NAc), 1′,2′-Dideoxyribose-3′-phosphate (dAB), and thymidine-glycol nucleic acid (GNA) S-isomer (Tgn), and X′ is 2-amino-2′-O-methyladenosine-3′-phosphate (a1).

[0229] In some instances, the guide strand comprises a nucleic acid sequence of 5′-mFmmmmFXmmmFmFmFmmmmmmm-3′, and the passenger strand comprises 5′-mmmmmmFmFmFmmmmmmmmmm-3′, wherein m is 2′-O-methyl modified nucleotide, F is 2′-F modified nucleotide, and X is selected from acyclic L-threoninol nucleic acid-thymine-3′-phosphate (T-T), acyclic L-threoninol nucleic acid-adenine-3′-phosphate (T-A), acyclic N-acetyl L-threoninol abasic nucleic acid-3′phosphate (T-NAc), 1′,2′-Dideoxyribose-3′-phosphate (dAB), thymidine-glycol nucleic acid (GNA) S-isomer (Tgn), 2′-O-methyl-2-thiouridine-3′-phosphate (u3), 2′-fluoro-2-thiouridine-3′-phosphate (U3f), or 2-amino-2′-O-methyladenosine-3′-phosphate (a1). In some instances, the guide strand comprises a nucleic acid sequence of 5′-mFmmmmFXmmmFmFmFmmmmmmm-3′, and the passenger strand comprises 5′-mmmmmmFmFmFmmmmmmmmmm-3′, wherein m is 2′-O-methyl modified nucleotide, F is 2′-F modified nucleotide, and X is selected from acyclic L-threoninol nucleic acid-thymine-3′-phosphate (T-T), acyclic L-threoninol nucleic acid-adenine-3′-phosphate (T-A), acyclic N-acetyl L-threoninol abasic nucleic acid-3′phosphate (T-NAc), 1′,2′-Dideoxyribose-3′-phosphate (dAB), and thymidine-glycol nucleic acid (GNA) S-isomer (Tgn). In some instances, the guide strand comprises a nucleic acid sequence of 5′-mFmmmmFXmmmFmFmFmmmmmmm-3′, and the passenger strand comprises 5′-msmsmmmmFmFmFmmX′mmmmmmm-3′, wherein m is 2′-O-methyl modified nucleotide, F is 2′-F modified nucleotide, and X is selected from acyclic L-threoninol nucleic acid-thymine-3′-phosphate (T-T), acyclic L-threoninol nucleic acid-adenine-3′-phosphate (T-A), acyclic N-acetyl L-threoninol abasic nucleic acid-3′phosphate (T-NAc), 1′,2′-Dideoxyribose-3′-phosphate (dAB), and thymidine-glycol nucleic acid (GNA) S-isomer (Tgn), and X′ is 2-amino-2′-O-methyladenosine-3′-phosphate (a1). In some instances, the guide strand comprises a nucleic acid sequence of 5′-mFmmmmFXmmmFmFmFmmmmmmm-3′, and the passenger strand comprises 5′-msmsmmmmFmFmFmmmX′mmmmmm-3′, wherein m is 2′-O-methyl modified nucleotide, F is 2′-F modified nucleotide, and X is selected from acyclic L-threoninol nucleic acid-thymine-3′-phosphate (T-T), acyclic L-threoninol nucleic acid-adenine-3′-phosphate (T-A), acyclic N-acetyl L-threoninol abasic nucleic acid-3′phosphate (T-NAc), 1′,2′-Dideoxyribose-3′-phosphate (dAB), and thymidine-glycol nucleic acid (GNA) S-isomer (Tgn), and X′ is 2-amino-2′-O-methyladenosine-3′-phosphate (a1).

[0230] In some instances, wherein the guide strand comprises a nucleic acid sequence of 5′-msFsmmmmFXmmmFmFmFmmmmmsmsm-3′, and the passenger strand comprises 5′-msmsmmmmFmFmFmmmmmmmmmm-3′, wherein m is 2′-O-methyl modified nucleotide, F is 2′-F modified nucleotide, s is phosphorothioate internucleotide linkage, and X is selected from acyclic L-threoninol nucleic acid-thymine-3′-phosphate (T-T), acyclic L-threoninol nucleic acid-adenine-3′-phosphate (T-A), acyclic N-acetyl L-threoninol abasic nucleic acid-3′phosphate (T-NAc), 1′,2′-Dideoxyribose-3′-phosphate (dAB), thymidine-glycol nucleic acid (GNA) S-isomer (Tgn), 2′-O-methyl-2-thiouridine-3′-phosphate (u3), 2′-fluoro-2-thiouridine-3′-phosphate (U3f), or 2-amino-2′-O-methyladenosine-3′-phosphate (a1). In some instances, wherein the guide strand comprises a nucleic acid sequence of 5′-msFsmmmmFXmmmFmFmFmmmmmsmsm-3′, and the passenger strand comprises 5′-msmsmmmmFmFmFmmmmmmmmmm-3′, wherein m is 2′-O-methyl modified nucleotide, F is 2′-F modified nucleotide, s is phosphorothioate internucleotide linkage, and X is selected from acyclic L-threoninol nucleic acid-thymine-3′-phosphate (T-T), acyclic L-threoninol nucleic acid-adenine-3′-phosphate (T-A), acyclic N-acetyl L-threoninol abasic nucleic acid-3′phosphate (T-NAc), 1′,2′-Dideoxyribose-3′-phosphate (dAB), and thymidine-glycol nucleic acid (GNA) S-isomer (Tgn). In some instances, the guide strand comprises a nucleic acid sequence of 5′-msFsmmmmFXmmmFmFmFmmmmmsmsm-3′, and the passenger strand comprises 5′-msmsmmmmFmFmFmmX′mmmmmmm-3′, wherein m is 2′-O-methyl modified nucleotide, F is 2′-F modified nucleotide, and X is selected from acyclic L-threoninol nucleic acid-thymine-3′-phosphate (T-T), acyclic L-threoninol nucleic acid-adenine-3′-phosphate (T-A), acyclic N-acetyl L-threoninol abasic nucleic acid-3′phosphate (T-NAc), 1′,2′-Dideoxyribose-3′-phosphate (dAB), and thymidine-glycol nucleic acid (GNA) S-isomer (Tgn), and X′ is 2-amino-2′-O-methyladenosine-3′-phosphate (a1). In some instances, the guide strand comprises a nucleic acid sequence of 5′-msFsmmmmFXmmmFmFmFmmmmmsmsm-3′, and the passenger strand comprises 5′-msmsmmmmFmFmFmmmX′mmmmmm-3′, wherein m is 2′-O-methyl modified nucleotide, F is 2′-F modified nucleotide, and X is selected from acyclic L-threoninol nucleic acid-thymine-3′-phosphate (T-T), acyclic L-threoninol nucleic acid-adenine-3′-phosphate (T-A), acyclic N-acetyl L-threoninol abasic nucleic acid-3′phosphate (T-NAc), 1′,2′-Dideoxyribose-3′-phosphate (dAB), and thymidine-glycol nucleic acid (GNA) S-isomer (Tgn), and X′ is 2-amino-2′-O-methyladenosine-3′-phosphate (a1).

### Conjugation

### Targeting Moiety

[0231] In certain aspects, the polynucleotide molecule described herein is coupled or conjugated with one or more targeting moieties to form a polynucleotide-targeting moiety conjugate molecule. In some instances, a targeting moiety is selected based on its ability to target the conjugate molecule described herein to a desired cell population, tissue, or an organ selectively or preferably. In some instances, the targeting moiety targets the cell, tissue, or an organ that expresses the corresponding binding partner (e.g., either the corresponding receptor or ligand) of the targeting moiety. For example, the polynucleotide molecule conjugated with N-acetyl galactosamine (GalNAc) can target hepatocytes expressing asialoglycoprotein (ASGP-R). A targeting moiety (i.e., an intracellular targeting moiety) that targets a desired site within the cell (e.g., endoplasmic reticulum, Golgi apparatus, nucleus, or mitochondria) may be included in the hybridized polynucleotide constructs disclosed herein. Non-limiting examples of the intracellular targeting moieties are provided in WO 2015/069932 and in WO 2015/188197; the disclosure of the intracellular targeting moieties in WO 2015/069932 and in WO 2015/188197 is incorporated herein by reference.

[0232] The polynucleotide molecule described herein, thus, may include one or more targeting moieties selected from the group consisting of intracellular targeting moieties, extracellular targeting moieties, and combinations thereof. Thus, the inclusion of one or more targeting moieties (e.g., extracellular targeting moieties including targeting moieties independently selected from the group consisting of folate, mannose, N-acetyl galactosamine, and prostate specific membrane antigen) and one or more intracellular targeting moiety (e.g., a moiety targeting endoplasmic reticulum, Golgi apparatus, nucleus, or mitochondria) in the polynucleotide molecule described herein can facilitate the delivery of the polynucleotides to a specific site within the specific cell population. In some aspects, the targeting moiety contains one or more mannose carbohydrates. Mannose targets the mannose receptor, which is a 175 KDa membrane-associated receptor that is expressed on sinusoidal liver cells and antigen presenting cells (e.g., macrophages and dendritic cells). It is a highly effective endocytotic/recycling receptor that binds and internalizes mannosylated pathogens and proteins (Lennartz et. al. J. Biol. Chem. 262:9942-9944, 1987; Taylor et. al. J. Biol. Chem. 265:12156-62, 1990).

[0233] Some of the targeting moieties are described herein. In some aspects, the targeting moiety contains or specifically binds to a protein selected from the group including insulin, insulin-like growth factor receptor 1 (IGF1R), IGF2R, insulin-like growth factor (IGF; e.g., IGF 1 or 2), mesenchymal epithelial transition factor receptor (c-met; also known as hepatocyte growth factor receptor (HGFR)), hepatocyte growth factor (HGF), epidermal growth factor receptor (EGFR), epidermal growth factor (EGF), heregulin, fibroblast growth factor receptor (FGFR), platelet-derived growth factor receptor (PDGFR), platelet-derived growth factor (PDGF), vascular endothelial growth factor receptor (VEGFR), vascular endothelial growth factor (VEGF), tumor necrosis factor receptor (TNFR), tumor necrosis factor alpha (TNF-α), TNF-β, folate receptor (FOLR), folate, transferrin, transferrin receptor (TfR), mesothelin, Fc receptor, c-kit receptor, c-kit, an integrin (e.g., an a4 integrin or a 0-1 integrin), P-selectin, sphingosine-1-phosphate receptor-1 (S1PR), hyaluronate receptor, leukocyte function antigen-1 (LFA-1), CD4, CD11, CD18, CD20, CD25, CD27, CD52, CD70, CD80, CD85, CD95 (Fas receptor), CD106 (vascular cell adhesion molecule 1 (VCAM1), CD166 (activated leukocyte cell adhesion molecule (ALCAM)), CD178 (Fas ligand), CD253 (TNF-related apoptosis-inducing ligand (TRAIL)), ICOS ligand, CCR2, CXCR3, CCR5, CXCL12 (stromal cell-derived factor 1 (SDF-1)), interleukin 1 (IL-1), IL-1ra, IL-2, IL-3, IL-4, IL-6, IL-7, IL-8, CTLA-4, MART-1, gp100, MAGE-1, ephrin (Eph) receptor, mucosal addressin cell adhesion molecule 1 (MAdCAM-1), carcinoembryonic antigen (CEA), LewisY, MUC-1, epithelial cell adhesion molecule (EpCAM), cancer antigen 125 (CA125), prostate specific membrane antigen (PSMA), TAG-72 antigen, and fragments thereof. In further aspects, the targeting moiety contains erythroblastic leukemia viral oncogene homolog (ErbB) receptor (e.g., ErbB1 receptor; ErbB2 receptor; ErbB3 receptor; and ErbB4 receptor). In some aspects, the targeting moiety contains one or more (e.g., from 1 to 6)N-acetyl galactosamines (GalNAc). In certain aspects, the targeting moiety contains one or more (e.g., from 1 to 6) mannoses. In other aspects, the targeting moiety contains a folate ligand. The folate ligand has the structure:

[chemical structure]

[0234] Certain targeting moieties may include bombesin, gastrin, gastrin-releasing peptide, tumor growth factors (TGF) (e.g., TGF-α or TGF-β), or vaccinia virus growth factor (VVGF). Non-peptidyl targeting moieties can also be used in the targeting moieties and may include, for example, steroids, carbohydrates, vitamins, and lectins. Some targeting moieties may include a polypeptide, such as somatostatin or somatostatin analog (e.g., octreotide or lanreotide), bombesin, or an antibody or antigen-binding fragment thereof. Antibodies may be of any recognized class or subclass, e.g., IgG, IgA, IgM, IgD, or IgE. Typical are those antibodies which fall within the IgG class. The antibodies can be derived from any species according techniques known in the art. Typically, however, the antibody is of human, murine, or rabbit origin. In addition, the antibody may be polyclonal or monoclonal, but is typically monoclonal. Human or chimeric (e.g., humanized) antibodies may be used in targeting moieties. Targeting moieties may include an antigen-binding fragment of an antibody. Such antibody fragments may include, for example, the Fab′, F(ab′)2, Fv, or Fab fragments, single domain antibody, ScFv, or other antigen-binding fragments. Fc fragments may also be employed in targeting moieties. Such antibody fragments can be prepared, for example, by proteolytic enzyme digestion, for example, by pepsin or papain digestion, reductive alkylation, or recombinant techniques. The materials and methods for preparing antibody fragments are well-known to those skilled in the art. See, e.g., Parham, J. Immunology, 131:2895, 1983; Lamoyi et al., J. Immunological Methods, 56:235, 1983.

[0235] Other peptides for use as a targeting auxiliary moiety in polynucleotide molecule described herein can be selected from KiSS peptides and analogs, urotensin II peptides and analogs, GnRH I and II peptides and analogs, depreotide, vapreotide, vasoactive intestinal peptide (VIP), cholecystokinin (CCK), RGD-containing peptides, melanocyte-stimulating hormone (MSH) peptide, neurotensin, calcitonin, glutathione, YIGSR (leukocyte-avid peptides, e.g., P483H, which contains the heparin-binding region of platelet factor-4 (PF-4) and a lysine-rich sequence), atrial natriuretic peptide (ANP), β-amyloid peptides, delta-opioid antagonists (such as ITIPP(psi)), annexin-V, endothelin, leukotriene B4 (LTB4), chemotactic peptides (e.g., N-formyl-methionyl-leucyl-phenylalanine-lysine (fMLFK), GP IIb/IIIa receptor antagonists (e.g., DMP444), human neutrophil elastase inhibitor (EPI-HNE-2 and EPI-HNE-4), plasmin inhibitor, antimicrobial peptides, apticide (P280 and P274), thrombospondin receptor (including analogs such as TP-1300), bitistatin, pituitary adenylyl cyclase type I receptor (PAC1), fibrin α-chain, peptides derived from phage display libraries, and conservative substitutions thereof.

[0236] One or more (e.g., from 1 to 6) targeting moieties can be linked to MOIETY or to X2 in formula (V′, V″, or V′″) through -LinkA-.

[0237] In some aspects, the targeting moiety includes one or more (e.g., from 1 to 6 or from 1 to 3) asialoglycoprotein receptor ligands (e.g., GalNAc). In some aspects, an asialoglycoprotein receptor ligand (e.g., GalNAc) is attached to -LinkA- through an anomeric carbon (e.g., where the anomeric carbon is the carbon atom in an acetal or a hemiaminal). In some aspects, an asialoglycoprotein receptor ligand (e.g., GalNAc) comprises an anomeric carbon bonded to trivalent, tetravalent linker, pentavalent, or hexavalent linker, wherein the anomeric carbon is part of a hemiaminal group. An asialoglycoprotein receptor ligand (e.g., GalNAc) attached to a linker through a hemiaminal may produce a hybridized polynucleotide construct having superior efficacy in gene silencing as compared to hybridized polynucleotide constructs having the asialoglycoprotein receptor ligand (e.g., GalNAc) attached to a linker through an acetal.

[0238] In some aspects, the linker and three asialoglycoprotein receptor targeting moieties, each of which comprises GalNAc, are as shown in Formula (V). In some instances, the conjugate described herein only comprises one asialoglycoprotein receptor targeting moiety, so the conjugate comprises a structure of Formula (V) with any two of the targeting moieties removed. In some instances, the conjugate described herein only comprises two asialoglycoprotein receptor targeting moieties, so the conjugate described herein comprises a structure of Formula (V) with any one of the targeting moieties removed.

[chemical structure]

wherein one of Y1 and Y2 is nucleotide, or wherein both Y1 and Y2 are nucleotides and Y1 and Y2 are consecutive or neighboring nucleotides from the polynucleic acid molecule described herein.

[0239] In some aspects, the linker and the targeting moieties described herein are conjugated to 3′ end of the passenger strand (e.g., as shown in Formula (V′)). In some aspects, the linker and the targeting moieties described herein are conjugated to 5′ end of the passenger strand (e.g., as shown in Formula (V″) or (V′″)). In some aspects, the linker and the targeting moieties described herein are conjugated to 3′ end of the guide strand (e.g., as shown in Formula (V′)). In some aspects, the linker and the targeting moieties described herein are conjugated to 5′ end of the guide strand (e.g., as shown in Formula (V″) or (V′″)).

[chemical structure]

wherein Z in formula (V′) corresponds to one of the sugar modifications described herein (e.g., −H, —OH, —O-Methyl, —F, or —O-methoxyethyl), and R in formula (V′) is adenine, uracil, guanine, cytosine, thymine, abasic, or others.

[chemical structure]

wherein Z in formula (V″) is a moiety that corresponds to one of the sugar modifications described herein (e.g., —H, —OH, —O-Methyl, —F, or —O-methoxyethyl) and R in formula (V″) is adenine, uracil, guanine, cytosine, thymine, abasic, or others.

[chemical structure]

wherein Z in formula (V′″) is a moiety that corresponds to one of the sugar modifications described herein (e.g., —H, —OH, —O-Methyl, —F, or —O-methoxyethyl) and R in formula (V′″) is adenine, uracil, guanine, cytosine, thymine, abasic, or others.

[chemical structure]

wherein Z in formula (V″″) is a moiety that corresponds to one of the sugar modifications described herein (e.g., —H, —OH, —O-Methyl, —F, or —O-methoxyethyl) and R in formula (V″″) is adenine, uracil, guanine, cytosine, thymine, abasic, or others.

[chemical structure]

wherein Z in formula (V′″″) is a moiety that corresponds to one of the sugar modifications described herein (e.g., —H, —OH, —O-Methyl, —F, or —O-methoxyethyl) and R in formula (V′″″) is adenine, uracil, guanine, cytosine, thymine, abasic, or others.

[chemical structure]

wherein Z in formula (V″″″) is a moiety that corresponds to one of the sugar modifications described herein (e.g., —H, —OH, —O-Methyl, —F, or —O-methoxyethyl) and R in formula (V″″″) is adenine, uracil, guanine, cytosine, thymine, abasic, or others.

[0240] In some instances, the 3′ end of passenger strand (or sense strand) from Table 1, Table 3, or Table 5 is conjugated with X2-GalNAc (see Formula (V) or (V′)). In some instances, the 5′ end of passenger strand (or sense strand) from Table 1, Table 3, Table 5, Table 7, Table 9, Table 11, Table 13, or Table 15 is conjugated with X2-GalNAc (see Formula (V), (V′), (V″″), (V′″″), (V″″″)). In some instances, the 5′ end of passenger strand (or sense strand) of a polynucleic acid molecule from Table 1, Table 3, Table 5, Table 7, Table 9, Table 11, Table 13, or Table 15 is conjugated with X2-GalNAc (see Formula (V), (V″), or (V′″)). In some instances, a nucleic acid within passenger strand (or sense strand) (not at the 5′ or 3′ end) from Table 1, Table 3, Table 5, Table 7, Table 9, Table 11, Table 13, or Table 15 is conjugated with X2-GalNAc (see Formula (V)). In some instances, the 3′ end of guide strand from Table 1, Table 3, Table 5, Table 7, Table 9, Table 11, Table 13, or Table 15 is conjugated with X2-GalNAc (see Formula (V), (V′), (V″″), (V′″″), (V″″″)). In some instances, the 5′ end of guide strand from Table 1, Table 3, Table 5, Table 7, Table 9, Table 11, Table 13, or Table 15 is conjugated with X2-GalNAc (see Formula (V), (V″), or (V′″)). In some instances, a nucleic acid within guide strand (not at the 5′ or 3′ end) from Table 1, Table 3, Table 5, Table 7, Table 9, Table 11, Table 13, or Table 15 is conjugated with X2-GalNAc (see Formula (V)).

[0241] One or more endosomal escape moieties (e.g., from 1 to 6 or from 1 to 3) can be attached to a polynucleotide construct or a hybridized polynucleotide construct disclosed herein as an auxiliary moiety. Exemplary endosomal escape moieties include chemotherapeutics (e.g., quinolones such as chloroquine); fusogenic lipids (e.g., dioleoylphosphatidyl-ethanolamine (DOPE)); and polymers such as polyethylenimine (PEI); poly(beta-amino ester)s; polypeptides, such as polyarginines (e.g., octaarginine) and polylysines (e.g., octalysine); proton sponges, viral capsids, and peptide transduction domains as described herein. For example, fusogenic peptides can be derived from the M2 protein of influenza A viruses; peptide analogs of the influenza virus hemagglutinin; the HEF protein of the influenza C virus; the transmembrane glycoprotein of filoviruses; the transmembrane glycoprotein of the rabies virus; the transmembrane glycoprotein (G) of the vesicular stomatitis virus; the fusion protein of the Sendai virus; the transmembrane glycoprotein of the Semliki forest virus; the fusion protein of the human respiratory syncytial virus (RSV); the fusion protein of the measles virus; the fusion protein of the Newcastle disease virus; the fusion protein of the visna virus; the fusion protein of murine leukemia virus; the fusion protein of the HTL virus; and the fusion protein of the simian immunodeficiency virus (SIV). Other moieties that can be employed to facilitate endosomal escape are described in Dominska et al., Journal of Cell Science, 123(8):1183-1189, 2010. Specific examples of endosomal escape moieties including moieties suitable for conjugation to the hybridized polynucleotide constructs disclosed herein are provided, e.g., in WO 2015/188197; the disclosure of these endosomal escape moieties is incorporated by reference herein.

[0242] One or more endosomal escape moieties (e.g., from 1 to 6 or from 1 to 3) can be attached to a MOIETY or X2 in formula (V′, V″, V′″, V″″, V′″″, or V″″″) through -LinkA-, as described herein.

[0243] One or more cell penetrating peptides (CPP) (e.g., from 1 to 6 or from 1 to 3) can be attached to a polynucleotide construct or a hybridized polynucleotide construct disclosed herein as an auxiliary moiety. The CPP can be linked to the hybridized polynucleotide bioreversibly through a disulfide linkage, as disclosed herein. Thus, upon delivery to a cell, the CPP can be cleaved intracellularly, e.g., by an intracellular enzyme (e.g., protein disulfide isomerase, thioredoxin, or a thioesterase) and thereby release the polynucleotide.

[0244] CPPs are known in the art (e.g., TAT or Arg8) (Snyder and Dowdy, 2005, Expert Opin. Drug Deliv. 2, 43-51). Specific examples of CPPs including moieties suitable for conjugation to the hybridized polynucleotide constructs disclosed herein are provided, e.g., in WO 2015/188197; the disclosure of these CPPs is incorporated by reference herein.

[0245] CPPs are positively charged peptides that are capable of facilitating the delivery of biological cargo to a cell. It is believed that the cationic charge of the CPPs is essential for their function. Moreover, the transduction of these proteins does not appear to be affected by cell type, and these proteins can efficiently transduce nearly all cells in culture with no apparent toxicity (Nagahara et al., Nat. Med. 4:1449-52, 1998). In addition to full-length proteins, CPPs have also been used successfully to induce the intracellular uptake of DNA (Abu-Amer, supra), antisense polynucleotides (Astriab-Fisher et al., Pharm. Res, 19:744-54, 2002), small molecules (Polyakov et al., Bioconjug. Chem. 11:762-71, 2000) and even inorganic 40 nm iron particles (Dodd et al., J. Immunol. Methods 256:89-105, 2001; Wunderbaldinger et al., Bioconjug. Chem. 13:264-8, 2002; Lewin et al., Nat. Biotechnol. 18:410-4, 2000; Josephson et al., Bioconjug. Chem. 10:186-91, 1999) suggesting that there is considerable flexibility in particle size in this process.

[0246] In one embodiment, a CPP useful in the methods and compositions as described herein includes a peptide featuring substantial alpha-helicity. It has been discovered that transfection is optimized when the CPP exhibits significant alpha-helicity. In another embodiment, the CPP includes a sequence containing basic amino acid residues that are substantially aligned along at least one face of the peptide. A CPP described herein may be a naturally occurring peptide or a synthetic peptide.

[0247] One or more cell penetrating peptides (e.g., from 1 to 6 or from 1 to 3) can be attached to a MOIETY or X2 in formula (V′, V″, V′″, V″″, V′″″, or V″″″) through -LinkA-, as described herein.

[0248] The polynucleotide constructs and the hybridized polynucleotide constructs disclosed herein can also include covalently attached neutral polymer-based auxiliary moieties. Neutral polymers include poly(C1-6 alkylene oxide), e.g., poly(ethylene glycol) and poly(propylene glycol) and copolymers thereof, e.g., di- and triblock copolymers. Other examples of polymers include esterified poly(acrylic acid), esterified poly(glutamic acid), esterified poly(aspartic acid), poly(vinyl alcohol), poly(ethylene-co-vinyl alcohol), poly(N-vinyl pyrrolidone), poly(ethyloxazoline), poly(alkylacrylates), poly(acrylamide), poly(N-alkylacrylamides), poly(N-acryloylmorpholine), poly(lactic acid), poly(glycolic acid), poly(dioxanone), poly(caprolactone), styrene-maleic acid anhydride copolymer, poly(L-lactide-co-glycolide) copolymer, divinyl ether-maleic anhydride copolymer, N-(2-hydroxypropyl)methacrylamide copolymer (HMPA), polyurethane, N-isopropylacrylamide polymers, and poly(N,N-dialkylacrylamides). Exemplary polymer auxiliary moieties may have molecular weights of less than 100, 300, 500, 1000, or 5000 Da (e.g., greater than 100 Da). Other polymers are known in the art.

[0249] One or more polymers (e.g., from 1 to 6 or from 1 to 3) can be attached to a MOIETY or X2 in formula (V′, V″, V′″, V″″, V′″″, or V″″″) through -LinkA-, as described herein.

### Conjugation Linkers

[0250] In some aspects, the polynucleic acid molecules described herein comprises a passenger strand or a guide strand bonded to at least one group of formula (I)

[chemical structure]

[0251] or a salt thereof, or a stereoisomer thereof,
[0252] where
[0253] each X¹ is independently O or S;
[0254] each X² is independently O, S, NH, or a bond;
[0255] MOIETY is optionally substituted C₂₋₁₀ alkane-tetrayl or a group -M¹-M²-M³-, wherein each M¹ and each M³ is independently absent or optionally substituted C₁₋₆ alkylene, and M² is optionally substituted C₃₋₉ heterocycle-tetrayl, optionally substituted C₆₋₁₀ arene-tetrayl, or optionally substituted C₃₋₈ cycloalkane-tetrayl;
[0256] each R¹ and each R² is independently H, optionally substituted C₁₋₁₆ alkyl, optionally substituted C₂₋₁₆ heteroalkyl, a conjugation moiety, or -LinkA(-T)ₚ, provided that at least one R¹ or at least one R² is a conjugation moiety or -LinkA(-T)ₚ;
[0257] each R³ is independently H, optionally substituted C₁₋₁₆ alkyl, optionally substituted C₂₋₁₆ heteroalkyl, optionally substituted C₂₋₁₆ alkenyl, optionally substituted C₂₋₁₆ alkynyl, optionally substituted (C₁₋₉ heterocyclyl)-C₁₋₆-alkyl, optionally substituted (C₆₋₁₀ aryl)-C₁₋₆-alkyl, optionally substituted (C₃₋₈ cycloalkyl)-C₁₋₆-alkyl, a conjugation moiety, or -LinkA(-T)ₚ;
[0258] R⁴ is H, optionally substituted C₁₋₆ alkyl, -LinkA(-T)ₚ, or -Sol;
[0259] each LinkA is independently a multivalent linker (e.g., including —C(O)—N(H)- (e.g., at least one multivalent linker including —C(O)—N(H)- bonded to T));
[0260] each T is independently an auxiliary moiety;
[0261] Sol is solid support;
[0262] m is an integer from 1 to 6;
[0263] each n is independently 0 or 1;
[0264] each p is independently an integer from 1 to 6; and
[0265] q is an integer from 0 to 3.

[0266] The at least one group of formula (I) may be bonded to a 5′ end, 3′ end, internucleoside phosphate, internucleoside phosphorothioate, or internucleoside phosphorodithioate of the polynucleotide. When the at least one group of formula (I) is bonded to the internucleoside phosphate, internucleoside phosphorothioate, or internucleoside phosphorodithioate, q is 0. The polynucleotide construct contains no more than one Sol.

[0267] Group -LinkA- can include from 0 to 3 multivalent monomers (e.g., optionally substituted C1-6 alkane-triyl, optionally substituted C1-6 alkane-tetrayl, or trivalent nitrogen atom) and one or more divalent monomers (e.g., from 1 to 40), where each divalent monomer is independently optionally substituted C1-6 alkylene; optionally substituted C2-6 alkenylene; optionally substituted C2-6 alkynylene; optionally substituted C3-8 cycloalkylene; optionally substituted C3-8 cycloalkenylene; optionally substituted C6-14 arylene; optionally substituted C1-9 heteroarylene having 1 to 4 heteroatoms selected from N, O, and S; optionally substituted C1-9 heterocyclylene having 1 to 4 heteroatoms selected from N, O, and S; imino; optionally substituted N; O; or S(O)m, wherein m is 0, 1, or 2. In some aspects, each monomer is independently optionally substituted C1-6 alkylene; optionally substituted C3-8 cycloalkylene; optionally substituted C3-8 cycloalkenylene; optionally substituted C6-14 arylene; optionally substituted C1-9 heteroarylene having 1 to 4 heteroatoms selected from N, O, and S; optionally substituted C1-9 heterocyclylene having 1 to 4 heteroatoms selected from N, O, and S; imino; optionally substituted N; O; or S(O)m, where m is 0, 1, or 2 (e.g., m is 2). In certain aspects, each monomer is independently optionally substituted C1-6 alkylene; optionally substituted C3-8 cycloalkylene; optionally substituted C3-8 cycloalkenylene; optionally substituted C6-14 arylene; optionally substituted C1-9 heteroarylene having 1 to 4 heteroatoms selected from N, O, and S; optionally substituted C1-9 heterocyclylene having 1 to 4 heteroatoms selected from N, O, and S; optionally substituted N; O; or S(O)m, where m is 0, 1, or 2 (e.g., m is 2). The non-bioreversible linker connecting the auxiliary moiety to the conjugating moiety or to the reaction product thereof can include from 2 to 500 (e.g., from 2 to 300 or from 2 to 200) of such monomers. Group -LinkA- may include a poly(alkylene oxide) (e.g., polyethylene oxide, polypropylene oxide, poly(trimethylene oxide), polybutylene oxide, poly(tetramethylene oxide), and diblock or triblock co-polymers thereof). In some aspects, the non-bioreversible linker includes polyethylene oxide (e.g., poly(ethylene oxide) having a molecular weight of less than 1 kDa).

[0268] Group -LinkA(-T)p in formula (I) may be prepared by a process described in the sections below. In some instances, -LinkA(-T)p is of formula (II):

[chemical structure]

[0269] where
[0270] each s is independently an integer from 0 to 20 (e.g., from 0 to 10), where the repeating units are the same or different;
[0271] Q¹ is a conjugation linker (e.g., [-Q³-Q⁴-Q⁵]ₛ-Q^{C}- where Q^{C} is optionally substituted C₂₋₁₂ heteroalkylene (e.g., a heteroalkylene containing —C(O)—N(H)—, —N(H)—C(O)—, —S(O)₂—N(H)—, or —N(H)—S(O)₂—), optionally substituted C₁₋₁₂ thioheterocyclylene (e.g.,

[chemical structure]

optionally substituted C₁₋₁₂ heterocyclylene (e.g., 1,2,3-triazole-1,4-diyl or

[chemical structure]

cyclobut-3-ene-1,2-dione-3,4-diyl, or pyrid-2-yl hydrazone);
[0272] Q² is a linear group (e.g., [-Q³-Q⁴-Q⁵]ₛ-, if p is 1, or a branched group (e.g., [-Q³-Q⁴-Q⁵]ₛ-Q⁷([Q³-Q⁴-Q⁵]ₛ-(Q⁷)ₚ₁)ₚ₂, where p1 is 0 or 1, p2 is 0, 1, 2, or 3), if p is an integer from 2 to 6;
[0273] each Q³ and each Q⁶ is independently absent, —CO—, —NH—, —O—, —S—, —SO₂—, —OC(O)—, —COO—, —NHC(O)—, —C(O)NH—, —CH₂—, —CH₂NH—, —NHCH₂—, —CH₂O—, or —OCH₂—;
[0274] each Q⁴ is independently absent, optionally substituted C₁₋₁₂ alkylene, optionally substituted C₂₋₁₂ alkenylene, optionally substituted C₂₋₁₂ alkynylene, optionally substituted C₂₋₁₂ heteroalkylene, optionally substituted C₆₋₁₀ arylene, optionally substituted C₁₋₉ heteroarylene, or optionally substituted C₁₋₉ heterocyclylene;
[0275] each Q⁵ is independently absent, —CO—, —NH—, —O—, —S—, —SO₂—, —CH₂—, —C(O)O—, —OC(O)—, —C(O)NH—, —NH—C(O)—, —NH—CH(R^{a})—C(O)—, or —C(O)—CH(R^{a})—NH—;
[0276] each Q⁷ is independently optionally substituted C₁₋₆ alkane-triyl, optionally substituted C₁₋₆ alkane-tetrayl, optionally substituted C₂₋₆ heteroalkane-triyl, or optionally substituted C₂₋₆ heteroalkane-tetrayl; and
[0277] each R^{a} is independently H or an amino acid side chain;
[0278] provided that at least one of Q³, Q⁴, and Q⁵ is present.

[0279] In some aspects, each Q⁴ is independently absent, optionally substituted C₁₋₁₂ alkylene, optionally substituted C₂₋₁₂ alkenylene, optionally substituted C₂₋₁₂ alkynylene, optionally substituted C₂₋₁₂ heteroalkylene, or optionally substituted C₁₋₉ heterocyclylene. In certain aspects, s is 1, 2, 3, 4, 5, 6, 7, 8, 9, 10, 11, 12, 13, 14, 15, 16, 17, 18, 19, or 20.

[0280] Thus, in formula (II), LinkA may include a single branching point, if each p1 is 0, or multiple branching points, if at least one p1 is 1.

[0281] In formula (II), Q¹ may be —O-Q^{L}-Q^{C}-, where Q^{L} is optionally substituted C₂₋₁₂ heteroalkylene, optionally substituted C₁₋₁₂ alkylene, or -(optionally substituted C₁₋₆ alkylene)-(optionally substituted C₆₋₁₀ arylene)-. In some aspects, Q^{L} is optionally substituted C₂₋₁₂ heteroalkylene or optionally substituted C₁₋₁₂ alkylene. In formula (II), Q^{C} may be:

[chemical structure]

[0282] In formula (II), Q² may be a linear group of formula [-Q³-Q⁴-Q⁵]ₛ- where Q³, Q⁴, and Q⁵ are as defined for formula (II). Alternatively, Q² may be a branched group [-Q³-Q⁴-Q⁵]ₛ-Q⁷([-Q³-Q⁴-Q⁵]ₛQ⁷)ₚ₁)ₚ₂, where each Q⁷ is independently optionally substituted C₁₋₆ alkane-triyl, optionally substituted C₁₋₆ alkane-tetrayl, optionally substituted C₂₋₆ heteroalkane-triyl, or optionally substituted C₂₋₆ heteroalkane-tetrayl;
[0283] where
[0284] p1 is 0 or 1;
[0285] p2 is 0, 1, 2, or 3;
[0286] where,
   [0287] when p1 is 0, LinkA is a trivalent or tetravalent linker, and,
   [0288] when p1 is 1, LinkA is a tetravalent, pentavalent, or hexavalent linker.

[0289] In certain aspects, p1 is 0.

[0290] In some aspects, Q⁷ is:

[chemical structure]

[0291] Compounds that may be used in the preparation of group -LinkA(-T)p in formula (I) are described herein as well as in WO 2015/188197. Non-limiting examples of-LinkA include:

[chemical structure]

[chemical structure]

[chemical structure]

[0292] where
[0293] R¹⁸ is a bond to MOIETY,
[0294] each R¹⁹ is independently a bond to auxiliary moiety,
[0295] each m5 is independently an integer from 1 to 20,
[0296] each m6 is independently an integer from 1 to 10,
[0297] m7 is an integer from 1 to 6, and
[0298] each X⁶ is independently O or S.

[0299] In formula (II), when the conjugation linker is of formula [-Q³-Q⁴-Q⁵]ₛ-Q^{C}-, -Q²([-Q³-Q⁴-Q⁵]ₛ-Q⁶-T)ₚ may be:

[chemical structure]

[chemical structure]

[0300] where
[0301] R²⁰ is a bond to Qc in Q¹,
[0302] each R¹⁹ is independently a bond to an auxiliary moiety,
[0303] each m5 is independently an integer from 1 to 20,
[0304] each m6 is independently an integer from 1 to 10,
[0305] m7 is an integer from 1 to 6, and
[0306] each X⁶ is independently O or S.

[0307] In some aspects, the linker described herein is cleavable. In some aspects, the linker described herein is non-cleavable.

[0308] In some aspects, the polynucleic acid molecule described herein comprises a guide strand or a passenger strand bonded to at least one group of formula (IV),

[chemical structure]

wherein at least one of Y1 or Y2 is a nucleotide from the polynucleic acid molecule.
In some instances, the linker comprises formula (IV). In some instances, the linker and the asialoglycoprotein receptor targeting moiety with the last nucleotide on the 3′ end of the passenger strand of the polynucleic acid molecule are shown in (V′), (V″″), (V′″″), or (V″″″) as described herein.

[0309] In some instances, the Y1 is the last nucleotide on the 3′ end or the first nucleotide on the 5′ end of one of the strands of the polynucleic acid molecule. In some instances, the Y1 is the last nucleotide on the 3′ end or the first nucleotide on the 5′ end of the passenger strand of the polynucleic acid molecule. In some instances, the Y1 is the last nucleotide on the 3′ end or the first nucleotide on the 5′ end of the passenger strand of the polynucleic acid molecule, and the Y2 is a 3-hydroxy-propoxy group. In some instances, the Y2 is the first nucleotide on the 5′ end or the last nucleotide on the 3′ end of one of the strands of the polynucleic acid molecule. In some instances, the Y2 is the first nucleotide on the 5′ end or the last nucleotide on the 3′ end of the passenger strand of the polynucleic acid molecule. In some instances, the Y2 is the first nucleotide on the 5′ end or the last nucleotide on the 3′ end of the passenger strand of the polynucleic acid molecule, and the Y1 is a 3-hydroxy-propoxy group. In other instances, the Y1 and Y2 are two consecutive nucleotides in one of the strands of the polynucleic acid molecule.

[0310] In some aspects, the targeting moiety described herein is conjugated to 3′ end of the passenger strand (e.g., formula (IV′)). In some aspects, the targeting moiety described herein is conjugated to 5′ end of the passenger strand (e.g., formula (IV″) or (IV′″)). In some aspects, the targeting moiety described herein is conjugated to 3′ end of the guide strand (e.g., formula (IV′)). In some aspects, the targeting moiety described herein is conjugated to 5′ end of the guide strand (e.g., formula (IV″) or (IV′″)).

[chemical structure]

wherein Z in formula (IV′) is a moiety that corresponds to one of the sugar modifications described herein (e.g., —H, —OH, —O-Methyl, —F, or —O-methoxyethyl) and R in formula (IV′) is adenine, uracil, guanine, cytosine, thymine, abasic, or others.

[chemical structure]

wherein Z in formula (IV″) is a moiety that corresponds to one of the sugar modifications described herein (e.g., —H, —OH, —O-Methyl, —F, or —O-methoxyethyl) and R in formula (IV″) is adenine, uracil, guanine, cytosine, thymine, abasic, or others.

[chemical structure]

wherein Z in formula (IV′″) is a moiety that corresponds to one of the sugar modifications described herein (e.g., —H, —OH, —O-Methyl, —F, or —O-methoxyethyl) and R in formula (IV′″) is adenine, uracil, guanine, cytosine, thymine, abasic, or others.

[chemical structure]

[0311] wherein Z in formula (IV″″) is a moiety that corresponds to one of the sugar modifications described herein (e.g., —H, —OH, —O-Methyl, —F, or —O-methoxyethyl) and R in formula (IV″″) is adenine, uracil, guanine, cytosine, thymine, abasic, or others.

[0312] In some aspects, the linker conjugated with one or more targeting moieties as shown in Formula (IV″) or (IV′″) is added to the first nucleotide on the 5′ end. In some aspects, the linker conjugated with one or more GalNAc as shown in Formula (V″) or (V′″) is added to the first nucleotide on the 5′ end. In some aspects, the modification pattern comprises one or more phosphorothioate modified internucleotide linkages. In some aspects, the modification pattern is shown in Formula (VII). In some aspects, the 5′ end modification known in the art is applied to the one or more inverted nucleotides.

### Pharmaceutical Compositions

[0313] Delivery of the polynucleotide molecules described herein can be achieved by contacting a cell with the construct using a variety of methods. In particular aspects, the polynucleotide molecule described herein is formulated with various excipients, vehicles, and carriers, as described more fully elsewhere herein.

[0314] A pharmaceutical composition described herein can be prepared to include a hybridized polynucleotide construct disclosed herein, into a form suitable for administration to a subject using carriers, excipients, and vehicles. Frequently used excipients include magnesium carbonate, titanium dioxide, lactose, mannitol and other sugars, talc, milk protein, gelatin, starch, vitamins, cellulose and its derivatives, animal and vegetable oils, polyethylene glycols and solvents, such as sterile water, alcohols, glycerol, and polyhydric alcohols. Intravenous vehicles include fluid and nutrient replenishers. Preservatives include antimicrobial, anti-oxidants, chelating agents, and inert gases. Other pharmaceutically acceptable vehicles include aqueous solutions, non-toxic excipients, including salts, preservatives, buffers and the like, as described, for instance, in Remington: The Science and Practice of Pharmacy, 21st Ed., Gennaro, Ed., Lippencott Williams & Wilkins (2005), and The United States Pharmacopeia: The National Formulary (USP 36 NF31), published in 2013. The pH and exact concentration of the various components of the pharmaceutical composition are adjusted according to routine skills in the art. See Goodman and Gilman's, The Pharmacological Basis for Therapeutics.

[0315] The pharmaceutical compositions described herein may be administered locally or systemically. The therapeutically effective amounts may vary according to factors, such as the degree of infection in a subject, the age, sex, and weight of the individual. Dosage regimes can be adjusted to provide the optimum therapeutic response. For example, several divided doses can be administered daily or the dose can be proportionally reduced as indicated by the exigencies of the therapeutic situation.

[0316] The pharmaceutical composition can be administered in a convenient manner, such as by injection (e.g., subcutaneous, intravenous, intraorbital, and the like), oral administration, ophthalmic application, inhalation, topical application, or rectal administration. Depending on the route of administration, the pharmaceutical composition can be coated with a material to protect the pharmaceutical composition from the action of enzymes, acids, and other natural conditions that may inactivate the pharmaceutical composition. The pharmaceutical composition can also be administered parenterally or intraperitoneally. Dispersions can also be prepared in glycerol, liquid polyethylene glycols, and mixtures thereof, and in oils. Under ordinary conditions of storage and use, these preparations may contain a preservative to prevent the growth of microorganisms.

[0317] Pharmaceutical compositions suitable for injectable use include sterile aqueous solutions (where water soluble) or dispersions and sterile powders for the extemporaneous preparation of sterile injectable solutions or dispersions. The composition will typically be sterile and fluid to the extent that easy syringability exists. Typically the composition will be stable under the conditions of manufacture and storage and preserved against the contaminating action of microorganisms, such as bacteria and fungi. The vehicle can be a solvent or dispersion medium containing, for example, water, ethanol, polyol (for example, glycerol, propylene glycol, and liquid polyethylene glycol, and the like), suitable mixtures thereof, and vegetable oils. The proper fluidity can be maintained, for example, by the use of a coating, such as lecithin, by the maintenance of the required particle size, in the case of dispersion, and by the use of surfactants. Prevention of the action of microorganisms can be achieved by various antibacterial and antifungal agents, for example, parabens, chlorobutanol, phenol, ascorbic acid, thimerosal, and the like. In many cases, isotonic agents, for example, sugars, polyalcohols, such as mannitol, sorbitol, or sodium chloride are used in the composition. Prolonged absorption of the injectable compositions can be brought about by including in the composition an agent that delays absorption, for example, aluminum monostearate and gelatin.

[0318] Sterile injectable solutions can be prepared by incorporating the pharmaceutical composition in the required amount in an appropriate solvent with one or a combination of ingredients enumerated above, as required, followed by filtered sterilization. Generally, dispersions are prepared by incorporating the pharmaceutical composition into a sterile vehicle that contains a basic dispersion medium and the required other ingredients from those enumerated above.

[0319] It is especially advantageous to formulate parenteral compositions in dosage unit form for ease of administration and uniformity of dosage. Dosage unit form as used herein, refers to physically discrete units suited as unitary dosages for the subject to be treated; each unit containing a predetermined quantity of pharmaceutical composition is calculated to produce the desired therapeutic effect in association with the required pharmaceutical vehicle. The specification for the dosage unit forms are related to the characteristics of the pharmaceutical composition and the particular therapeutic effect to be achieve. The principal pharmaceutical composition is compounded for convenient and effective administration in effective amounts with a suitable pharmaceutically acceptable vehicle in an acceptable dosage unit. In the case of compositions containing supplementary active ingredients, the dosages are determined by reference to the usual dose and manner of administration of the ingredients.

[0320] The pharmaceutical composition can be orally administered, for example, in a carrier, e.g., in an enteric-coated unit dosage form. The pharmaceutical composition and other ingredients can also be enclosed in a hard or soft-shell gelatin capsule or compressed into tablets. For oral therapeutic administration, the pharmaceutical composition can be incorporated with excipients and used in the form of ingestible tablets, troches, capsules, pills, wafers, and the like. Such compositions and preparations may contain at least 1% by weight of active compound. The percentage of the compositions and preparations can, of course, be varied and can conveniently be between about 5% to about 80% of the weight of the unit. The tablets, troches, pills, capsules, and the like can also contain the following: a binder, such as gum tragacanth, acacia, corn starch, or gelatin; excipients such as dicalcium phosphate; a disintegrating agent, such as corn starch, potato starch, alginic acid, and the like; a lubricant, such as magnesium stearate; and a sweetening agent, such as sucrose, lactose or saccharin, or a flavoring agent such as peppermint, oil of wintergreen, or cherry flavoring. When the dosage unit form is a capsule, it can contain, in addition to materials of the above type, a liquid carrier. Various other materials can be present as coatings or to otherwise modify the physical form of the dosage unit. For instance, tablets, pills, or capsules can be coated with shellac, sugar, or both. A syrup or elixir can contain the agent, sucrose as a sweetening agent, methyl and propylparabens as preservatives, a dye, and flavoring, such as cherry or orange flavor. Any material used in preparing any dosage unit form may be of pharmaceutically acceptable purity and substantially non-toxic in the amounts employed. In addition, the pharmaceutical composition can be incorporated into sustained-release preparations and formulations.

[0321] The pharmaceutical composition described herein may comprise one or more permeation enhancer that facilitates bioavailability of the polynucleotide molecule described herein. WO 2000/67798, Muranishi, 1990, Crit. Rev. Ther. Drug Carrier Systems, 7, 1, Lee et al., 1991, Crit. Rev. Ther. Drug Carrier Systems, 8, 91 are herein incorporated by reference in its entirety. In some aspects, the permeation enhancer is intestinal. In some aspects, the permeation enhancer is transdermal. In some aspects, the permeation enhancer is to facilitate crossing the brain-blood barrier. In some aspects, the permeation enhancer improves the permeability in the oral, nasal, buccal, pulmonary, vaginal, or corneal delivery model. In some aspects, the permeation enhancer is a fatty acid or a derivative thereof. In some aspects, the permeation enhancer is a surfactant or a derivative thereof. In some aspects, the permeation enhancer is a bile salt or a derivative thereof. In some aspects, the permeation enhancer is a chelating agent or a derivative thereof. In some aspects, the permeation enhancer is a non-chelating non-surfactant or a derivative thereof. In some aspects, the permeation enhancer is an ester or a derivative thereof. In some aspects, the permeation enhancer is an ether or a derivative thereof. In some aspects, the permeation enhancer is arachidonic acid, undecanoic acid, oleic acid, lauric acid, caprylic acid, capric acid, myristic acid, palmitic acid, stearic acid, linoleic acid, linolenic acid, dicaprate, tricaprate, monoolein, dilaurin, glyceryl 1-monocaprate, 1-dodecylazacycloheptan-2-one, an acylcarnitine, an acylcholine, or a monoglyceride, a diglyceride or a pharmaceutically acceptable salt thereof. In one specific aspect, the permeation enhancer is sodium caprate (C10). In some aspects, the permeation enhancer is chenodeoxycholic acid (CDCA), ursodeoxychenodeoxycholic acid (UDCA), cholic acid, dehydrocholic acid, deoxycholic acid, glucholic acid, glycholic acid, glycodeoxycholic acid, taurocholic acid taurodeoxycholic acid, sodium tauro-24,25-dihydro-fusidate or sodium glycodihydrofusidate. In some aspects, the permeation enhancer is polyoxyethylene-9-lauryl ether, or polyoxyethylene-20-cetyl ether.

[0322] For the polynucleotide molecule described herein, suitable pharmaceutically acceptable salts include (i) salts formed with cations such as sodium, potassium, ammonium, magnesium, calcium, polyamines such as spermine and spermidine, etc.; (ii) acid addition salts formed with inorganic acids, for example hydrochloric acid, hydrobromic acid, sulfuric acid, phosphoric acid, and the like; and (iii) salts formed with organic acids such as, for example, acetic acid, oxalic acid, tartaric acid, succinic acid, maleic acid, fumaric acid, gluconic acid, citric acid, malic acid, ascorbic acid, benzoic acid, tannic acid, palmitic acid, alginic acid, polyglutamic acid, naphthalenesulfonic acid, methanesulfonic acid, p-toluenesulfonic acid, naphthalenedisulfonic acid, polygalacturonic acid, and the like.

[0323] While the hybridized polynucleotide constructs described herein may not require the use of excipients for delivery to the target cell, the use of excipients may be advantageous in some aspects. Thus, for delivery to the target cell, the hybridized polynucleotide molecule described herein can non-covalently bind an excipient to form a complex. The excipient can be used to alter biodistribution after delivery, to enhance uptake, to increase half-life or stability of the strands in the hybridized polynucleotide constructs (e.g., improve nuclease resistance), and/or to increase targeting to a particular cell or tissue type.

[0324] Exemplary excipients include a condensing agent (e.g., an agent capable of attracting or binding a nucleic acid through ionic or electrostatic interactions); a fusogenic agent (e.g., an agent capable of fusing and/or being transported through a cell membrane); a protein to target a particular cell or tissue type (e.g., thyrotropin, melanotropin, lectin, glycoprotein, surfactant protein A, or any other protein); a lipid; a lipopolysaccharide; a lipid micelle or a liposome (e.g., formed from phospholipids, such as phosphotidylcholine, fatty acids, glycolipids, ceramides, glycerides, cholesterols, or any combination thereof); a nanoparticle (e.g., silica, lipid, carbohydrate, or other pharmaceutically-acceptable polymer nanoparticle); a polyplex formed from cationic polymers and an anionic agent (e.g., a CRO), where exemplary cationic polymers include polyamines (e.g., polylysine, polyarginine, polyamidoamine, and polyethylene imine); cholesterol; a dendrimer (e.g., a polyamidoamine (PAMAM) dendrimer); a serum protein (e.g., human serum albumin (HSA) or low-density lipoprotein (LDL)); a carbohydrate (e.g., dextran, pullulan, chitin, chitosan, inulin, cyclodextrin, or hyaluronic acid); a lipid; a synthetic polymer, (e.g., polylysine (PLL), polyethylenimine, poly-L-aspartic acid, poly-L-glutamic acid, styrene-maleic acid anhydride copolymer, poly(L-lactide-co-glycolic) copolymer, divinyl ether-maleic anhydride copolymer, N-(2-hydroxypropyl)methacrylamide copolymer (HMPA), polyethylene glycol (PEG), polyvinyl alcohol (PVA), polyurethane, poly(2-ethylacrylic acid), N-isopropylacrylamide polymer, pseudopeptide-polyamine, peptidomimetic polyamine, or polyamine); a cationic moiety (e.g., cationic lipid, cationic porphyrin, quaternary salt of a polyamine, or alpha helical peptide); a multivalent sugar (e.g., multivalent lactose, multivalent galactose, N-acetyl-galactosamine, N-acetyl-glucosamine, multivalent mannose, or multivalent fucose); a vitamin (e.g., vitamin A, vitamin E, vitamin K, vitamin B, folic acid, vitamin B12, riboflavin, biotin, or pyridoxal); a cofactor; or a drug to disrupt cellular cytoskeleton to increase uptake (e.g., taxol, vincristine, vinblastine, cytochalasin, nocodazole, japlakinolide, latrunculin A, phalloidin, swinholide A, indanocine, or myoservin).

[0325] Other therapeutic agents as described herein may be included in a pharmaceutical composition described herein in combination with a polynucleotide molecule described herein.

### Methods of Treatment

[0326] In some aspects, described herein is a method of modulating expression of AGT gene in a subject, comprising: administering to the subject a polynucleic acid molecule described herein, a polynucleic acid molecule conjugate described herein, or a pharmaceutical composition described herein, thereby modulating the expression of AGT gene in the subject.

[0327] In some aspects, the method described herein reduces expression of AGT gene in a subject by about or at least 10% compared to a negative control. In some aspects, the method described herein reduces expression of AGT gene in a subject by about or at least 20% compared to a negative control. In some aspects, the method described herein reduces expression of AGT gene in a subject by about or at least 30% compared to a negative control. In some aspects, the method described herein reduces expression of AGT gene in a subject by about or at least 40% compared to a negative control. In some aspects, the method described herein reduces expression of AGT gene in a subject by about or at least 50% compared to a negative control. In some aspects, the method described herein reduces expression of AGT gene in a subject by about or at least 60% compared to a negative control. In some aspects, the method described herein reduces expression of AGT gene in a subject by about or at least 70% compared to a negative control. In some aspects, the method described herein reduces expression of AGT gene in a subject by about or at least 80% compared to a negative control. In some aspects, the method described herein reduces expression of AGT gene in a subject by about or at least 90% compared to a negative control. In some aspects, the method described herein reduces expression of AGT gene in a subject by about 100% compared to a negative control.

[0328] In some aspects, the method described herein achieves an IC50 value of about 5 nM. In some aspects, the method described herein achieves an IC50 value of about 10 nM. In some aspects, the method described herein achieves an IC50 value of about 15 nM. In some aspects, the method described herein achieves an IC50 value of about 20 nM. In some aspects, the method described herein achieves an IC50 value of about 25 nM. In some aspects, the method described herein achieves an IC50 value of about 30 nM. In some aspects, the method described herein achieves an IC50 value of about 35 nM. In some aspects, the method described herein achieves an IC50 value of about 40 nM. In some aspects, the method described herein achieves an IC50 value of about 45 nM. In some aspects, the method described herein achieves an IC50 value of about 50 nM. In some aspects, the method described herein achieves an IC50 value of about 55 nM. In some aspects, the method described herein achieves an IC50 value of about 60 nM. In some aspects, the method described herein achieves an IC50 value of about 65 nM. In some aspects, the method described herein achieves an IC50 value of about 70 nM. In some aspects, the method described herein achieves an IC50 value of about 75 nM. In some aspects, the method described herein achieves an IC50 value of about 80 nM. In some aspects, the method described herein achieves an IC50 value of about 85 nM. In some aspects, the method described herein achieves an IC50 value of about 90 nM. In some aspects, the method described herein achieves an IC50 value of about 95 nM. In some aspects, the method described herein achieves an IC50 value of about 100 nM.

[0329] In some aspects, described herein is a method of modulating LDL in a subject in need thereof, comprising administering to the subject a polynucleic acid molecule described herein, a polynucleic acid molecule conjugate described herein, or a pharmaceutical composition described herein, wherein the polynucleic acid molecule described herein, the polynucleic acid molecule conjugate described herein, or the pharmaceutical composition described herein reduces the expression of AGT gene in the subject.

[0330] In some aspects, described herein is a method of preventing, alleviating, or treating hypertension in a subject in need thereof, comprising: comprising administering to the subject a polynucleic acid molecule described herein, a polynucleic acid molecule conjugate described herein, or a pharmaceutical composition described herein, wherein the polynucleic acid molecule described herein, the polynucleic acid molecule conjugate described herein, or the pharmaceutical composition described herein reduces the expression of AGT gene in the subject.

[0331] In some aspects, described herein is a method of preventing, alleviating, or treating atherosclerosis in a subject in need thereof, comprising: comprising administering to the subject a polynucleic acid molecule described herein, a polynucleic acid molecule conjugate described herein, or a pharmaceutical composition described herein, wherein the polynucleic acid molecule described herein, the polynucleic acid molecule conjugate described herein, or the pharmaceutical composition described herein reduces the expression of AGT gene in the subject. In some cases, the subject suffers from a coronary artery disease, a cerebrovascular disease or a peripheral artery disease. In some cases, the subject suffers from heart attack. In some cases, the subject suffers from stroke. In some cases, the subject suffers from aneurysm. In some cases, the subject suffers from blood clot. In some cases, the subject suffers from Angina. In some cases, the subject suffers from chronic kidney disease. In some cases, the subject suffers from carotid heart disease.

[0332] In some aspects, described herein is a method of preventing, alleviating, or treating obesity in a subject in need thereof, comprising: comprising administering to the subject a polynucleic acid molecule described herein, a polynucleic acid molecule conjugate described herein, or a pharmaceutical composition described herein, wherein the polynucleic acid molecule described herein, the polynucleic acid molecule conjugate described herein, or the pharmaceutical composition described herein reduces the expression of AGT gene in the subject.

### EXAMPLES

[0333] These examples are provided for illustrative purposes only and not to limit the scope of the claims provided herein. For all of the sequences presented herein, oligonucleotide structure representation reads from left to right (5′ to 3′). Monomer codes present in the oligonucleotide code are linked by 5′-3′ phosphodiester bonds unless specified (succeeded by 3′ internucleotide linkage reading left to right). Abbreviations of nucleotide monomers used in oligonucleotide structure representation are as follows. “A” stands for Adenosine-3′-phosphate; “a” stands for 2′-O-methyladenosine-3′-phosphate; “Af” stands for 2′-fluoroadenosine-3′-phosphate; “dA” stands for 2′-deoxyadenosine-3′-phosphate; “al” refers to 2-Amino-2′-O-methyladenosine-3′-phosphate; “C” stands for Cytidine-3′-phosphate; “c” stands for 2′-O-methylcytidine-3′-phosphate; “Cf” stands for 2′-fluorocytidine-3′-phosphate; “dC” stands for 2′-deoxycytidine-3′-phosphate; “G” stands for Guanosine-3′-phosphate; “g” stands for 2′-O-methylguanosine-3′-phosphate; “Gf” stands for 2′-fluoroguanosine-3′-phosphate; “dG” stands for 2′-deoxyguanosine-3′-phosphate; “U” stands for Uridine-3′-phosphate; “u” stands for 2′-O-methyluridine-3′-phosphate; “Uf” stands for 2′-fluorouridine-3′-phosphate; “u3” refers to 2′-O-methyl-2-thiouridine-3′-phosphate; “U3f” refers to 2′-fluoro-2-thiouridine-3′-phosphate; “dU” stands for 2′-deoxyuridine-3′-phosphate; “T” stands for 5-methyluridine-3′-phosphate; “t” stands for 2′-O-methyl-5-methyluridine-3′-phosphate; “Tf” stands for 2′-fluoro-5-methyluridine-3′-phosphate; “dT” stands for thymidine-3′-phosphate; “s” stands for 3′-phosphorothioate; “(T-T)” refers to acyclic L-threoninol nucleic acid-thymine-3′-phosphate; “(T-A)” refers to acyclic L-threoninol nucleic acid-adenine-3′-phosphate; “(T-NAc)” refers to acyclic N-acetyl L-threoninol abasic nucleic acid-3′phosphate; “(dAB)” refers to 1′,2′-Dideoxyribose-3′-phosphate; and “(Tgn)” refers to thymidine-glycol nucleic acid (GNA) S-isomer.

### Example 1—In Vitro Efficacy of siRNAs Targeting AGT

[0334] A panel of siRNAs were generated (shown in Table 1), and the 3′ end of each passenger strand (or sense strand) was conjugated with a triantennary GalNAc moiety. The siRNA-GalNAc conjugates were evaluated in vitro in primary human hepatocytes.

[0335] Cryopreserved primary human hepatocytes (PHHs) were thawed and plated on collagen-coated 96-well plates at a density of 9×10⁴ cells per well. Hepatocytes were treated by incubating with the siRNAs shown in Table 1 with the 3′ end of each passenger strand (or sense strand) conjugated with a triantennary GalNAc moiety in the absence of transfection reagents (free uptake) for 48 hours. Cells were treated with the siRNAs at a concentrations of 10 μM or 0.5 pM. Untreated PHHs were used as a negative control. An siRNA targeting an unrelated gene (Ahsa1) was also used as a negative control. At the end of the incubation period, the cells were lysed, and the relative expression of the target gene was measured by branched DNA (bDNA) assay and normalized to a house-keeping gene (e.g., human GAPDH) using standard protocols. The in-vitro potency of the siRNAs are listed in Table 2.

### Example 2—Drug Response Curves for Selected AGT siRNAs

[0336] A selected group of siRNAs targeting AGT shown in Table 3 were used, and the 3′ end of each passenger strand (or sense strand) was conjugated with a triantennary GalNAc moiety. The siRNA-GalNAc conjugates were evaluated at 10 different doses in primary human hepatocytes, using a similar experimental setup in Example 1. The corresponding identification of IC₅₀ and IC₈₀ were specified in Table 4.

### Example 3—Testing AGT siRNAs in Transgenic Mice

[0337] Sequences of siRNAs evaluated are specified in Table 5. The 3′ end of each passenger strand (or sense strand) were conjugated with a triantennary GalNAc moiety via X2 (X2-GalNAc as in Formula (V′)). A reference sequence, SRS-001674, was included and was used as a positive control. The modified nucleotide sequence of the passenger strand of SRS-001674 is 5′-gsuscaucCfaCfAfAfugagaguaca-3′ (SEQ ID NO: 2330) and the modified nucleotide sequence of the guide strand of SRS-001674 is 5′-usGfsuac(Tgn)cucauugUfgGfaugacsgsa-3′ (SEQ ID NO: 2331). A triantennary GalNAc is conjugated at the 3′ end of the passenger strand of SRS-001674. Transgenic AGT mice (HuAoGen Mice, B6.Cg-Tg(hAGT)2041 Sig/J, Jackson Laboratory) were assigned to treatment groups (n=5, 2 males, 3 females). Each treatment group was administered a single 3 mg/kg subcutaneous injection of AGT siRNA on day 1. Blood samples were collected pre-dose (days -14, -7, 0), and on days 7, 14, 21, and 28. Blood was processed to plasma, and AGT circulating protein levels in all plasma samples were analyzed using an AGT ELISA assay (IBL America, #27412). Results for each individual were calculated as a percentage of circulating AGT protein remaining relative to the day 1 pre-dose timepoint, and group mean values are listed in Table 6. In addition, liver hAGT mRNA was measured by qPCR (normalized to mouse ACTB) on day 28 using specific primers. As shown in FIG. 1, expression relative to the saline control group is presented as mean±standard deviation. Taken together, these results demonstrate that these siRNAs effectively reduce human AGT mRNA in the liver and reduce AGT protein in plasma. For example, SRS-001711 reduced liver AGT mRNA on average of-84% on day 28 with concomitant reduction in plasma AGT (-92%, -91%, -91%, and -82% on days 7, 14, 21, and 28, respectively).

### Example 4—Testing AGT siRNAs in Non-Human Primates

[0338] Sequences of siRNAs used for the non-human primate study are specified in Table 5 with the 3′ end of each passenger strand (or sense strand) conjugated with a GalNAc via X2 (see Formula (V′)). Two male and two female cynomolgus monkeys were assigned to each treatment group (total n=4). Each treatment group was administered a single 2 mg/kg subcutaneous injection of AGT siRNA (as shown in Table 5) on day 1 and day 43. Blood samples are collected pre-dose (days -20, -8, and day 1), and on days 4, 8, 11, 15, 22, 29, 36, 43, 50, 57, 64, 71, 78, and 85. Blood was processed to serum, and AGT circulating protein levels in all serum samples were analyzed using an AGT ELISA assay (IBL America, #27412). As shown in FIG. 2, results for each individual were calculated as the % change in circulating AGT protein relative to the day 1 pre-dose timepoint, and group values are presented as mean standard deviation.

### Example 5—Testing AGT siRNAs in Transgenic Mice

[0339] Sequences of siRNAs evaluated are specified in Table 7 with the 3′ end of each passenger strand (or sense strand) conjugated with a GalNAc via X2 (see Formula (V′)). A reference sequence, SRS-001674, was included and was used as a positive control. The modified nucleotide sequence of the sense strand of SRS-001674 is 5′-gsuscaucCfaCfAfAfugagaguaca-3′ (SEQ ID NO: 2330) and the modified nucleotide of the guide strand of SRS-001674 is 5′-usGfsuac(Tgn)cucauugUfgGfaugacsgsa-3′ (SEQ ID NO: 2331). A triantennary GalNAc is conjugated at the 3′ end of the passenger strand of SRS-001674. Transgenic AGT mice (HuAoGen Mice, B6.Cg-Tg(hAGT)2041 Sig/J, Jackson Laboratory) were assigned to treatment groups (n=5, 2 males, 3 females). Each treatment group was administered a single 3 mg/kg subcutaneous injection of AGT siRNA on day 1. Blood samples were collected pre-dose (days -14, -7, 0), and on days 7, 14, 21, and 28. Blood was processed to plasma, and AGT circulating protein levels in all plasma samples were analyzed using an AGT ELISA assay (IBL America, #27412). Results for each individual were calculated as a percentage of circulating AGT protein remaining relative to the day 1 pre-dose timepoint, and group mean values are listed in Table 8. In addition, liver hAGT mRNA was measured by qPCR (normalized to mouse ACTB) on day 28 using specific primers. As shown in FIG. 3, expression relative to the saline control group is presented as mean±standard deviation. Taken together, these results demonstrate that these siRNAs effectively reduce human AGT mRNA in the liver and reduce AGT protein in plasma. For example, SRS-001849 reduced liver AGT mRNA on average of −87% on day 28 with concomitant reduction in plasma AGT (−92%, −91%, −87%, and −85% on days 7, 14, 21, and 28, respectively).

### Example 6—Testing AGT siRNAs in Transgenic Mice

[0340] Sequences of siRNAs evaluated are specified in Table 9 with the 3′ end of each passenger strand (or sense strand) conjugated with a GalNAc via X2 (see Formula (V′)). Seed region modifications of parent sequence SRS-001711 were evaluated. Transgenic AGT mice (HuAoGen Mice, B6.Cg-Tg(hAGT)2041 Sig/J, Jackson Laboratory) were assigned to treatment groups (n=5, 3 males, 2 females). Each treatment group was administered a single 3 mg/kg subcutaneous injection of AGT siRNA on day 0. Blood samples were collected pre-dose (days −7, 0), and on days 7, 14, 21, 28, and 35. Blood was processed to plasma, and AGT circulating protein levels in all plasma samples were analyzed using an AGT ELISA assay (IBL America, #27412). Results for each individual were calculated as a percentage of circulating AGT protein remaining relative to the pre-dose average (Day −7, Day 0), and group mean values are listed in Table 10. In addition, liver hAGT mRNA was measured by qPCR (normalized to mouse ACTB) on day 35 using specific primers. As shown in FIG. 4, expression relative to the saline control group is presented as mean±standard deviation. Taken together, these results demonstrate that these seed region modified siRNAs effectively reduce human AGT mRNA in the liver and reduce AGT protein in plasma. For example, SRS-002055, SRS-002060, and SRS-002061 reduced plasma AGT and liver AGT mRNA to levels similar to those of SRS-001711.

### Example 7—Testing AGT siRNAs in Transgenic Mice

[0341] Sequences of siRNAs evaluated are specified in Table 11 with the 3′ end of each passenger strand (or sense strand) conjugated with a GalNAc via X2 (see Formula (V″″)). Seed region modifications of parent sequences SRS-002085, SRS-002088, and SRS-002093 were evaluated. Transgenic AGT mice (HuAoGen Mice, B6.Cg-Tg(hAGT)2041 Sig/J, Jackson Laboratory) were assigned to treatment groups (n=4 or 5, 1-2 males, 2-3 females). Each treatment group was administered a single 3 mg/kg subcutaneous injection of AGT siRNA on day 0. Blood samples were collected pre-dose (days -7, 0), and on day 28. Blood was processed to plasma, and AGT circulating protein levels in all plasma samples were analyzed using an AGT ELISA assay (IBL America, #27412). Results for each individual at Day 28 were calculated as a percentage of circulating AGT protein remaining relative to the pre-dose average (Day -7, Day 0), and group mean values are listed in Table 12. In addition, liver hAGT mRNA was measured by qPCR (normalized to mouse ACTB) on day 35 using specific primers. As shown in FIG. 5, expression relative to the saline control group is presented as mean±standard deviation. These results demonstrate the seed region modifications evaluated for the SRS-002093 parent sequence are well tolerated. For example, SRS-002094 and SRS-002095 reduced plasma AGT on Day 28 bp -83% and -80%, respectively. In addition, SRS-002094 and SRS-002095 reduced liver AGT mRNA on Day 35 by -69% and -74%, respectively. These reductions were similar to improved when compared to the parent sequence of SRS-002093.

### Example 8—Testing AGT siRNAs in Transgenic Mice

[0342] Sequences of siRNAs evaluated are specified in Table 13 with the 3′ end of each passenger strand (or sense strand) conjugated with a GalNAc via X2 (see Formula (V′)). Transgenic AGT mice (HuAoGen Mice, B6.Cg-Tg(hAGT)2041 Sig/J, Jackson Laboratory) were assigned to treatment groups (n=4, 2-3 males, 1-2 females). Each treatment group was administered a single 2 mg/kg subcutaneous injection of AGT siRNA on day 0. Blood samples were collected pre-dose (days -7, 0), and on days 7, 14, 21, 28, 35, and 42. Blood was processed to plasma, and AGT circulating protein levels in all plasma samples were analyzed using an AGT ELISA assay (IBL America, #27412). Results for each individual at were calculated as a percentage of circulating AGT protein remaining relative to the pre-dose average (Day -7, Day 0), and group mean values are listed in Table 14. In addition, liver hAGT mRNA was measured by qPCR (normalized to mouse ACTB) on day 42 using specific primers. As shown in FIG. 6, expression relative to the saline control group is presented as mean±standard deviation. Taken together, these results demonstrate that these siRNAs effectively reduce human AGT mRNA in the liver and reduce AGT protein in plasma.

### Example 9—Testing AGT siRNAs in Non-Human Primates

[0343] Sequences of siRNAs used for the non-human primate study are specified in Table 15 with the 3′ end of each passenger stand (or sense strand) conjugated with a GalNAc via X2 (see Formula (V′)). Four male cynomolgus monkeys were assigned to each treatment group. Each treatment group was administered a single 2 mg/kg subcutaneous injection of AGT siRNA (as shown in Table 15) on day 1. Blood samples were collected pre-dose (days -14, -7, and day 1), and on days 8, 15, 22, 29, and 36. Blood was processed to serum, and AGT circulating protein levels in all serum samples were analyzed using an AGT ELISA assay (IBL America, #27412). As shown in FIG. 7 and Table 16, results for each individual were calculated as the % change in circulating AGT protein relative to the day 1 pre-dose timepoint, and group values are presented as mean±standard deviation.

[0344] While preferred aspects of the present disclosure have been shown and described herein, it will be obvious to those skilled in the art that such aspects are provided by way of example only. Numerous variations, changes, and substitutions will now occur to those skilled in the art without departing from the disclosure. It should be understood that various alternatives to the aspects of the disclosure described herein may be employed in practicing the disclosure. It is intended that the following claims define the scope of the disclosure and that methods and structures within the scope of these claims and their equivalents be covered thereby.

TABLE 1
Sequences for In Vitro PHH Free Uptake Dual Dose Screening (10 uM and 0.5 uM)

| | | SEQ | | SEQ | | | | | |
|---|---|---|---|---|---|---|---|---|---|
| Duplex | Target | ID | | ID | Guide Strand Base | SEQ | Passenger Strand | SEQ | Passenger Strand |
| ID | Position | NO | Guide Strand Sequence (5′-3′) | NO | Sequence (5′-3′) | ID NO | Sequence (5′-3′) | ID NO | Base Sequence (5′-3′) |
| SRS- | 36 | 193 | usUfsgcucGfcuucCfgCfaUfacccususc | 1 | UUGCUCGCUUCCGCAUACCCUUC | 577 | asgsgguaUfgCfgGfaagcgagcaa | 385 | AGGGUAUGCGGAAGCGAGCAA |
| 000789 | | | | | | | | | |
| SRS- | 37 | 194 | usGfsugcuCfgcuuCfcGfcAfuaccesusu | 2 | UGUGCUCGCUUCCGCAUACCCUU | 578 | gsgsguauGfcGfgAfagcgagcaca | 386 | GGGUAUGCGGAAGCGAGCACA |
| 000790 | | | | | | | | | |
| SRS- | 39 | 195 | usGfsggugCfucgcUfuCfcGfcauacsesc | 3 | UGGGUGCUCGCUUCCGCAUACCC | 579 | gsusaugcGfgAfaGfcgagcaccca | 387 | GUAUGCGGAAGCGAGCACCCA |
| 000791 | | | | | | | | | |
| SRS- | 41 | 196 | usUfsggggUfgcucGfcUfuCfcgcausasc | 4 | UUGGGGUGCUCGCUUCCGCAUAC | 580 | asusgeggAfaGfcGfagcaccccaa | 388 | AUGCGGAAGCGAGCACCCCAA |
| 000792 | | | | | | | | | |
| SRS- | 65 | 197 | usAfscaccGfgcagGfaGfcCfaucucsasg | 5 | UACACCGGCAGGAGCCAUCUCAG | 581 | gsasgaugGfcUfcCfugccggugua | 389 | GAGAUGGCUCCUGCCGGUGUA |
| 000793 | | | | | | | | | |
| SRS- | 135 | 198 | usUfsauguAfcaccCfgGfuCfaccugscsa | 6 | UUAUGUACACCCGGUCACCUGCA | 582 | csasggugAfcCfgGfguguacauaa | 390 | CAGGUGACCGGGUGUACAUAA |
| 000794 | | | | | | | | | |
| SRS- | 140 | 199 | usGfsggugUfauguAfcAfcCfcggucsasc | 7 | UGGGUGUAUGUACACCCGGUCAC | 583 | gsasccggGfuGfuAfcauacaccca | 391 | GACCGGGUGUACAUACACCCA |
| 000795 | | | | | | | | | |
| SRS- | 142 | 200 | usAfsggggUfguauGfuAfcAfcccggsusc | 8 | UAGGGGUGUAUGUACACCCGGUC | 584 | cscsggguGfuAfcAfuacaccecua | 392 | CCGGGUGUACAUACACCCCUA |
| 000796 | | | | | | | | | |
| SRS- | 143 | 201 | usAfsagggGfuguaUfgUfaCfacccgsgsu | 9 | UAAGGGGUGUAUGUACACCCGGU | 585 | csgsggugUfaCfaUfacaccccuua | 393 | CGGGUGUACAUACACCCCUUA |
| 000797 | | | | | | | | | |
| SRS- | 144 | 202 | usGfsaaggGfguguAfuGfuAfcacccsgsg | 10 | UGAAGGGGUGUAUGUACACCCGG | 586 | gsgsguguAfcAfuAfcaccccuuca | 394 | GGGUGUACAUACACCCCUUCA |
| 000798 | | | | | | | | | |
| SRS- | 148 | 203 | usGfsguggAfagggGfuGfuAfuguacsasc | 11 | UGGUGGAAGGGGUGUAUGUACAC | 587 | gsusacauAfcAfcCfccuuccacca | 395 | GUACAUACACCCCUUCCACCA |
| 000799 | | | | | | | | | |
| SRS- | 149 | 204 | usAfsggugGfaaggGfgUfgUfauguascsa | 12 | UAGGUGGAAGGGGUGUAUGUACA | 588 | usascauaCfaCfcCfcuuccaccua | 396 | UACAUACACCCCUUCCACCUA |
| 000800 | | | | | | | | | |
| SRS- | 167 | 205 | usCfsucucAfuuguGfgAfuGfacgagsgsu | 13 | UCUCUCAUUGUGGAUGACGAGGU | 589 | csuscgucAfuCfcAfcaaugagaga | 397 | CUCGUCAUCCACAAUGAGAGA |
| 000801 | | | | | | | | | |
| SRS- | 170 | 206 | usGfsuacuCfucauUfgUfgGfaugacsgsa | 14 | UGUACUCUCAUUGUGGAUGACGA | 590 | gsuscaucCfaCfaAfugagaguaca | 398 | GUCAUCCACAAUGAGAGUACA |
| 000802 | | | | | | | | | |
| SRS- | 171 | 207 | usGfsguacUfcucaUfuGfuGfgaugascsg | 15 | UGGUACUCUCAUUGUGGAUGACG | 591 | uscsauccAfcAfaUfgagaguacca | 399 | UCAUCCACAAUGAGAGUACCA |
| 000803 | | | | | | | | | |
| SRS- | 172 | 208 | usAfsgguaCfucucAfuUfgUfggaugsasc | 16 | UAGGUACUCUCAUUGUGGAUGAC | 592 | csasuccaCfaAfuGfagaguaccua | 400 | CAUCCACAAUGAGAGUACCUA |
| 000804 | | | | | | | | | |
| SRS- | 173 | 209 | usCfsagguAfcucuCfaUfuGfuggausgsa | 17 | UCAGGUACUCUCAUUGUGGAUGA | 593 | asusccacAfaUfgAfgaguaccuga | 401 | AUCCACAAUGAGAGUACCUGA |
| 000805 | | | | | | | | | |
| SRS- | 175 | 210 | usCfsacagGfuacuCfuCfaUfuguggsasu | 18 | UCACAGGUACUCUCAUUGUGGAU | 594 | cscsacaaUfgAfgAfguaccuguga | 402 | CCACAAUGAGAGUACCUGUGA |
| 000806 | | | | | | | | | |
| SRS- | 181 | 211 | usGfscugcUfcacaGfgUfaCfucucasusu | 19 | UGCUGCUCACAGGUACUCUCAUU | 595 | usgsagagUfaCfcUfgugagcagca | 403 | UGAGAGUACCUGUGAGCAGCA |
| 000807 | | | | | | | | | |
| SRS- | 200 | 212 | usCfscggcAfuuggCfcUfuUfgccagscsu | 20 | UCCGGCAUUGGCCUUUGCCAGCU | 596 | csusggcaAfaGfgCfcaaugccgga | 404 | CUGGCAAAGGCCAAUGCCGGA |
| 000808 | | | | | | | | | |
| SRS- | 203 | 213 | usUfsucccGfgcauUfgGfcCfuuugcscsa | 21 | UUUCCCGGCAUUGGCCUUUGCCA | 597 | gscsaaagGfcCfaAfugccgggaaa | 405 | GCAAAGGCCAAUGCCGGGAAA |
| 000809 | | | | | | | | | |
| SRS- | 254 | 214 | usGfsgggaUfgucuUfgGfcCfugaaususg | 22 | UGGGGAUGUCUUGGCCUGAAUUG | 598 | asusucagGfcCfaAfgacaucccca | 406 | AUUCAGGCCAAGACAUCCCCA |
| 000810 | | | | | | | | | |
| SRS- | 255 | 215 | usAfsggggAfugucUfuGfgCfcugaasusu | 23 | UAGGGGAUGUCUUGGCCUGAAUU | 599 | ususcaggCfcAfaGfacauccccua | 407 | UUCAGGCCAAGACAUCCCCUA |
| 000811 | | | | | | | | | |
| SRS- | 276 | 216 | usCfsuguaGfggccUfuUfuCfauccascsa | 24 | UCUGUAGGGCCUUUUCAUCCACA | 600 | usgsgaugAfaAfaGfgcccuacaga | 408 | UGGAUGAAAAGGCCCUACAGA |
| 000812 | | | | | | | | | |
| SRS- | 299 | 217 | usGfscagcGfacuaGfcAfcCfagcugsgsu | 25 | UGCAGCGACUAGCACCAGCUGGU | 601 | csasgcugGfuGfcUfagucgcugca | 409 | CAGCUGGUGCUAGUCGCUGCA |
| 000813 | | | | | | | | | |
| SRS- | 309 | 218 | usGfsucaaGfuuuuGfcAfgCfgacuasgsc | 26 | UGUCAAGUUUUGCAGCGACUAGC | 602 | usasgucgCfuGfcAfaaacuugaca | 410 | UAGUCGCUGCAAAACUUGACA |
| 000814 | | | | | | | | | |
| SRS- | 313 | 219 | usCfsggugUfcaagUfuUfuGfcagcgsasc | 27 | UCGGUGUCAAGUUUUGCAGCGAC | 603 | csgscugcAfaAfaCfuugacaccga | 411 | CGCUGCAAAACUUGACACCGA |
| 000815 | | | | | | | | | |
| SRS- | 314 | 220 | usUfscgguGfucaaGfuUfuUfgcagcsgsa | 28 | UUCGGUGUCAAGUUUUGCAGCGA | 604 | gscsugcaAfaAfcUfugacaccgaa | 412 | GCUGCAAAACUUGACACCGAA |
| 000816 | | | | | | | | | |
| SRS- | 323 | 221 | usAfsacuuGfucuuCfgGfuGfucaagsusu | 29 | UAACUUGUCUUCGGUGUCAAGUU | 605 | csusugacAfcCfgAfagacaaguua | 413 | CUUGACACCGAAGACAAGUUA |
| 000817 | | | | | | | | | |
| SRS- | 324 | 222 | usCfsaacuUfgucuUfcGfgUfgucaasgsu | 30 | UCAACUUGUCUUCGGUGUCAAGU | 606 | ususgacaCfcGfaAfgacaaguuga | 414 | UUGACACCGAAGACAAGUUGA |
| 000818 | | | | | | | | | |
| SRS- | 325 | 223 | usUfscaacUfugucUfuCfgGfugucasasg | 31 | UUCAACUUGUCUUCGGUGUCAAG | 607 | usgsacacCfgAfaGfacaaguugaa | 415 | UGACACCGAAGACAAGUUGAA |
| 000819 | | | | | | | | | |
| SRS- | 326 | 224 | usCfsucaaCfuuguCfuUfcGfgugucsasa | 32 | UCUCAACUUGUCUUCGGUGUCAA | 608 | gsascaccGfaAfgAfcaaguugaga | 416 | GACACCGAAGACAAGUUGAGA |
| 000820 | | | | | | | | | |
| SRS- | 333 | 225 | usUfsgcggCfccucAfaCfuUfgucuuscsg | 33 | UUGCGGCCCUCAACUUGUCUUCG | 609 | asasgacaAfgUfuGfagggccgcaa | 417 | AAGACAAGUUGAGGGCCGCAA |
| 000821 | | | | | | | | | |
| SRS- | 334 | 226 | usUfsugcgGfcccuCfaAfcUfugucususc | 34 | UUUGCGGCCCUCAACUUGUCUUC | 610 | asgsacaaGfuUfgAfgggccgcaaa | 418 | AGACAAGUUGAGGGCCGCAAA |
| 000822 | | | | | | | | | |
| SRS- | 344 | 227 | usAfsucccGfaccaUfuGfcGfgcccuscsa | 35 | UAUCCCGACCAUUGCGGCCCUCA | 611 | asgsggccGfcAfaUfggucgggaua | 419 | AGGGCCGCAAUGGUCGGGAUA |
| 000823 | | | | | | | | | |
| SRS- | 347 | 228 | usAfsgcauCfccgaCfcAfuUfgcggcscsc | 36 | UAGCAUCCCGACCAUUGCGGCCC | 612 | gscscgcaAfuGfgUfcgggaugcua | 420 | GCCGCAAUGGUCGGGAUGCUA |
| 000824 | | | | | | | | | |
| SRS- | 352 | 229 | usUfsggccAfgcauCfcCfgAfccauusgsc | 37 | UUGGCCAGCAUCCCGACCAUUGC | 613 | asasugguCfgGfgAfugcuggccaa | 421 | AAUGGUCGGGAUGCUGGCCAA |
| 000825 | | | | | | | | | |
| SRS- | 353 | 230 | usUfsuggcCfagcaUfcCfcGfaccaususg | 38 | UUUGGCCAGCAUCCCGACCAUUG | 614 | asusggucGfgGfaUfgcuggccaaa | 422 | AUGGUCGGGAUGCUGGCCAAA |
| 000826 | | | | | | | | | |
| SRS- | 369 | 231 | usAfscggaAfgcccAfaGfaAfguuggscsc | 39 | UACGGAAGCCCAAGAAGUUGGCC | 615 | cscsaacuUfcUfuGfggcuuccgua | 423 | CCAACUUCUUGGGCUUCCGUA |
| 000827 | | | | | | | | | |
| SRS- | 370 | 232 | usUfsacggAfagccCfaAfgAfaguugsgsc | 40 | UUACGGAAGCCCAAGAAGUUGGC | 616 | csasacuuCfuUfgGfgcuuccguaa | 424 | CAACUUCUUGGGCUUCCGUAA |
| 000828 | | | | | | | | | |
| SRS- | 371 | 233 | usAfsuacgGfaagcCfcAfaGfaaguusgsg | 41 | UAUACGGAAGCCCAAGAAGUUGG | 617 | asascuucUfuGfgGfcuuccguaua | 425 | AACUUCUUGGGCUUCCGUAUA |
| 000829 | | | | | | | | | |
| SRS- | 373 | 234 | usAfsuauaCfggaaGfcCfcAfagaagsusu | 42 | UAUAUACGGAAGCCCAAGAAGUU | 618 | csusucuuGfgGfcUfuccguauaua | 426 | CUUCUUGGGCUUCCGUAUAUA |
| 000830 | | | | | | | | | |
| SRS- | 374 | 235 | usUfsauauAfcggaAfgCfcCfaagaasgsu | 43 | UUAUAUACGGAAGCCCAAGAAGU | 619 | ususcuugGfgCfuUfccguauauaa | 427 | UUCUUGGGCUUCCGUAUAUAA |
| 000831 | | | | | | | | | |
| SRS- | 375 | 236 | usAfsuauaUfacggAfaGfcCfcaagasasg | 44 | UAUAUAUACGGAAGCCCAAGAAG | 620 | uscsuuggGfcUfuCfcguauauaua | 428 | UCUUGGGCUUCCGUAUAUAUA |
| 000832 | | | | | | | | | |
| SRS- | 376 | 237 | usCfsauauAfuacgGfaAfgCfccaagsasa | 45 | UCAUAUAUACGGAAGCCCAAGAA | 621 | csusugggCfuUfcCfguauauauga | 429 | CUUGGGCUUCCGUAUAUAUGA |
| 000833 | | | | | | | | | |
| SRS- | 377 | 238 | usCfscauaUfauacGfgAfaGfcccaasgsa | 46 | UCCAUAUAUACGGAAGCCCAAGA | 622 | ususgggcUfuCfcGfuauauaugga | 430 | UUGGGCUUCCGUAUAUAUGGA |
| 000834 | | | | | | | | | |
| SRS- | 379 | 239 | usUfsgccaUfauauAfcGfgAfagcccsasa | 47 | UUGCCAUAUAUACGGAAGCCCAA | 623 | gsgsgcuuCfcGfuAfuauauggcaa | 431 | GGGCUUCCGUAUAUAUGGCAA |
| 000835 | | | | | | | | | |
| SRS- | 380 | 240 | usAfsugccAfuauaUfaCfgGfaagccscsa | 48 | UAUGCCAUAUAUACGGAAGCCCA | 624 | gsgscuucCfgUfaUfauauggcaua | 432 | GGCUUCCGUAUAUAUGGCAUA |
| 000836 | | | | | | | | | |
| SRS- | 382 | 241 | usGfscaugCfcauaUfaUfaCfggaagscsc | 49 | UGCAUGCCAUAUAUACGGAAGCC | 625 | csusuccgUfaUfaUfauggcaugca | 433 | CUUCCGUAUAUAUGGCAUGCA |
| 000837 | | | | | | | | | |
| SRS- | 383 | 242 | usUfsgcauGfccauAfuAfuAfcggaasgsc | 50 | UUGCAUGCCAUAUAUACGGAAGC | 626 | ususccguAfuAfuAfuggcaugcaa | 434 | UUCCGUAUAUAUGGCAUGCAA |
| 000838 | | | | | | | | | |
| SRS- | 384 | 243 | usGfsugcaUfgccaUfaUfaUfacggasasg | 51 | UGUGCAUGCCAUAUAUACGGAAG | 627 | uscscguaUfaUfaUfggcaugcaca | 435 | UCCGUAUAUAUGGCAUGCACA |
| 000839 | | | | | | | | | |
| SRS- | 387 | 244 | usAfscuguGfcaugCfcAfuAfuauacsgsg | 52 | UACUGUGCAUGCCAUAUAUACGG | 628 | gsusauauAfuGfgCfaugcacagua | 436 | GUAUAUAUGGCAUGCACAGUA |
| 000840 | | | | | | | | | |
| SRS- | 391 | 245 | usGfscucaCfugugCfaUfgCfcauausasu | 53 | UGCUCACUGUGCAUGCCAUAUAU | 629 | asusauggCfaUfgCfacagugagca | 437 | AUAUGGCAUGCACAGUGAGCA |
| 000841 | | | | | | | | | |
| SRS- | 393 | 246 | usUfsagcuCfacugUfgCfaUfgccausasu | 54 | UUAGCUCACUGUGCAUGCCAUAU | 630 | asusggcaUfgCfaCfagugagcuaa | 438 | AUGGCAUGCACAGUGAGCUAA |
| 000842 | | | | | | | | | |
| SRS- | 394 | 247 | usAfsuagcUfcacuGfuGfcAfugccasusa | 55 | UAUAGCUCACUGUGCAUGCCAUA | 631 | usgsgcauGfcAfcAfgugagcuaua | 439 | UGGCAUGCACAGUGAGCUAUA |
| 000843 | | | | | | | | | |
| SRS- | 401 | 248 | usAfscgccCfcauaGfcUfcAfcugugscsa | 56 | UACGCCCCAUAGCUCACUGUGCA | 632 | csascaguGfaGfcUfauggggcgua | 440 | CACAGUGAGCUAUGGGGCGUA |
| 000844 | | | | | | | | | |
| SRS- | 402 | 249 | usCfsacgcCfccauAfgCfuCfacugusgsc | 57 | UCACGCCCCAUAGCUCACUGUGC | 633 | ascsagugAfgCfuAfuggggcguga | 441 | ACAGUGAGCUAUGGGGCGUGA |
| 000845 | | | | | | | | | |
| SRS- | 403 | 250 | usCfscacgCfcccaUfaGfcUfcacugsusg | 58 | UCCACGCCCCAUAGCUCACUGUG | 634 | csasgugaGfcUfaUfggggcgugga | 442 | CAGUGAGCUAUGGGGCGUGGA |
| 000846 | | | | | | | | | |
| SRS- | 405 | 251 | usGfsaccaCfgcccCfaUfaGfcucacsusg | 59 | UGACCACGCCCCAUAGCUCACUG | 635 | gsusgagcUfaUfgGfggcgugguca | 443 | GUGAGCUAUGGGGCGUGGUCA |
| 000847 | | | | | | | | | |
| SRS- | 406 | 252 | usGfsgaccAfcgccCfcAfuAfgcucascsu | 60 | UGGACCACGCCCCAUAGCUCACU | 636 | usgsagcuAfuGfgGfgcguggucca | 444 | UGAGCUAUGGGGCGUGGUCCA |
| 000848 | | | | | | | | | |
| SRS- | 407 | 253 | usUfsggacCfacgcCfcCfaUfagcucsasc | 61 | UUGGACCACGCCCCAUAGCUCAC | 637 | gsasgcuaUfgGfgGfcgugguccaa | 445 | GAGCUAUGGGGCGUGGUCCAA |
| 000849 | | | | | | | | | |
| SRS- | 410 | 254 | usCfscaugGfaccaCfgCfcCfcauagscsu | 62 | UCCAUGGACCACGCCCCAUAGCU | 638 | csusauggGfgCfgUfgguccaugga | 446 | CUAUGGGGCGUGGUCCAUGGA |
| 000850 | | | | | | | | | |
| SRS- | 418 | 255 | usCfsggugGfccccAfuGfgAfccacgscsc | 63 | UCGGUGGCCCCAUGGACCACGCC | 639 | csgsugguCfcAfuGfgggccaccga | 447 | CGUGGUCCAUGGGGCCACCGA |
| 000851 | | | | | | | | | |
| SRS- | 444 | 256 | usGfsccaaAfgacaGfcCfgUfuggggsasg | 64 | UGCCAAAGACAGCCGUUGGGGAG | 640 | cscsccaaCfgGfcUfgucuuuggca | 448 | CCCCAACGGCUGUCUUUGGCA |
| 000852 | | | | | | | | | |
| SRS- | 447 | 257 | usGfsgugcCfaaagAfcAfgCfcguugsgsg | 65 | UGGUGCCAAAGACAGCCGUUGGG | 641 | csasacggCfuGfuCfuuuggcacca | 449 | CAACGGCUGUCUUUGGCACCA |
| 000853 | | | | | | | | | |
| SRS- | 448 | 258 | usGfsggugCfcaaaGfaCfaGfccguusgsg | 66 | UGGGUGCCAAAGACAGCCGUUGG | 642 | asascggcUfgUfcUfuuggcaccca | 450 | AACGGCUGUCUUUGGCACCCA |
| 000854 | | | | | | | | | |
| SRS- | 495 | 259 | usUfsagccUfgucaGfcUfgUfgugguscsc | 67 | UUAGCCUGUCAGCUGUGUGGUCC | 643 | ascscacaCfaGfcUfgacaggcuaa | 451 | ACCACACAGCUGACAGGCUAA |
| 000855 | | | | | | | | | |
| SRS- | 496 | 260 | usGfsuagcCfugucAfgCfuGfuguggsusc | 68 | UGUAGCCUGUCAGCUGUGUGGUC | 644 | cscsacacAfgCfuGfacaggcuaca | 452 | CCACACAGCUGACAGGCUACA |
| 000856 | | | | | | | | | |
| SRS- | 497 | 261 | usUfsguagCfcuguCfaGfcUfgugugsgsu | 69 | UUGUAGCCUGUCAGCUGUGUGGU | 645 | csascacaGfcUfgAfcaggcuacaa | 453 | CACACAGCUGACAGGCUACAA |
| 000857 | | | | | | | | | |
| SRS- | 504 | 262 | usGfsauugCfcuguAfgCfcUfgucagscsu | 70 | UGAUUGCCUGUAGCCUGUCAGCU | 646 | csusgacaGfgCfuAfcaggcaauca | 454 | CUGACAGGCUACAGGCAAUCA |
| 000858 | | | | | | | | | |
| SRS- | 542 | 263 | usCfsgggaGfgugcAfgUfuCfuugucscsu | 71 | UCGGGAGGUGCAGUUCUUGUCCU | 647 | gsascaagAfaCfuGfcaccucccga | 455 | GACAAGAACUGCACCUCCCGA |
| 000859 | | | | | | | | | |
| SRS- | 553 | 264 | usGfscgcaUfccagCfcGfgGfaggugscsa | 72 | UGCGCAUCCAGCCGGGAGGUGCA | 648 | csasccucCfcGfgCfuggaugcgca | 456 | CACCUCCCGGCUGGAUGCGCA |
| 000860 | | | | | | | | | |
| SRS- | 557 | 265 | usUfsugugCfgcauCfcAfgCfcgggasgsg | 73 | UUUGUGCGCAUCCAGCCGGGAGG | 649 | uscsccggCfuGfgAfugcgcacaaa | 457 | UCCCGGCUGGAUGCGCACAAA |
| 000861 | | | | | | | | | |
| SRS- | 558 | 266 | usCfsuuguGfcgcaUfcCfaGfccgggsasg | 74 | UCUUGUGCGCAUCCAGCCGGGAG | 650 | cscscggcUfgGfaUfgcgcacaaga | 458 | CCCGGCUGGAUGCGCACAAGA |
| 000862 | | | | | | | | | |
| SRS- | 562 | 267 | usGfsgaccUfugugCfgCfaUfccagcscsg | 75 | UGGACCUUGUGCGCAUCCAGCCG | 651 | gscsuggaUfgCfgCfacaaggucca | 459 | GCUGGAUGCGCACAAGGUCCA |
| 000863 | | | | | | | | | |
| SRS- | 563 | 268 | usAfsggacCfuuguGfcGfcAfuccagscsc | 76 | UAGGACCUUGUGCGCAUCCAGCC | 652 | csusggauGfcGfcAfcaagguccua | 460 | CUGGAUGCGCACAAGGUCCUA |
| 000864 | | | | | | | | | |
| SRS- | 569 | 269 | usGfscagaCfaggaCfcUfuGfugcgcsasu | 77 | UGCAGACAGGACCUUGUGCGCAU | 653 | gscsgcacAfaGfgUfccugucugca | 461 | GCGCACAAGGUCCUGUCUGCA |
| 000865 | | | | | | | | | |
| SRS- | 701 | 270 | usAfsggccCfugcaCfaAfaCfggcugscsu | 78 | UAGGCCCUGCACAAACGGCUGCU | 654 | csasgccgUfuUfgUfgcagggccua | 462 | CAGCCGUUUGUGCAGGGCCUA |
| 000866 | | | | | | | | | |
| SRS- | 712 | 271 | usUfsauagAfgagcCfaGfgCfccugcsasc | 79 | UUAUAGAGAGCCAGGCCCUGCAC | 655 | gscsagggCfcUfgGfcucucuauaa | 463 | GCAGGGCCUGGCUCUCUAUAA |
| 000867 | | | | | | | | | |
| SRS- | 719 | 272 | usAfscaggGfguauAfgAfgAfgccagsgsc | 80 | UACAGGGGUAUAGAGAGCCAGGC | 656 | csusggcuCfuCfuAfuaccccugua | 464 | CUGGCUCUCUAUACCCCUGUA |
| 000868 | | | | | | | | | |
| SRS- | 721 | 273 | usCfscacaGfggguAfuAfgAfgagccsasg | 81 | UCCACAGGGGUAUAGAGAGCCAG | 657 | gsgscucuCfuAfuAfccccugugga | 465 | GGCUCUCUAUACCCCUGUGGA |
| 000869 | | | | | | | | | |
| SRS- | 723 | 274 | usGfsaccaCfagggGfuAfuAfgagagscsc | 82 | UGACCACAGGGGUAUAGAGAGCC | 658 | csuscucuAfuAfcCfccugugguca | 466 | CUCUCUAUACCCCUGUGGUCA |
| 000870 | | | | | | | | | |
| SRS- | 724 | 275 | usGfsgaccAfcaggGfgUfaUfagagasgsc | 83 | UGGACCACAGGGGUAUAGAGAGC | 659 | uscsucuaUfaCfcCfcuguggucca | 467 | UCUCUAUACCCCUGUGGUCCA |
| 000871 | | | | | | | | | |
| SRS- | 726 | 276 | usGfsaggaCfcacaGfgGfgUfauagasgsa | 84 | UGAGGACCACAGGGGUAUAGAGA | 660 | uscsuauaCfcCfcUfgugguccuca | 468 | UCUAUACCCCUGUGGUCCUCA |
| 000872 | | | | | | | | | |
| SRS- | 735 | 277 | usAfsgagcGfugggAfgGfaCfcacagsgsg | 85 | UAGAGCGUGGGAGGACCACAGGG | 661 | csusguggUfcCfuCfccacgcucua | 469 | CUGUGGUCCUCCCACGCUCUA |
| 000873 | | | | | | | | | |
| SRS- | 746 | 278 | usGfsugaaGfuccaGfaGfaGfcguggsgsa | 86 | UGUGAAGUCCAGAGAGCGUGGGA | 662 | cscsacgcUfcUfcUfggacuucaca | 470 | CCACGCUCUCUGGACUUCACA |
| 000874 | | | | | | | | | |
| SRS- | 751 | 279 | usGfsuucuGfugaaGfuCfcAfgagagscsg | 87 | UGUUCUGUGAAGUCCAGAGAGCG | 663 | csuscucuGfgAfcUfucacagaaca | 471 | CUCUCUGGACUUCACAGAACA |
| 000875 | | | | | | | | | |
| SRS- | 784 | 280 | usUfsgaacCfugucAfaUfcUfucucasgsc | 88 | UUGAACCUGUCAAUCUUCUCAGC | 664 | usgsagaaGfaUfuGfacagguucaa | 472 | UGAGAAGAUUGACAGGUUCAA |
| 000876 | | | | | | | | | |
| SRS- | 794 | 281 | usAfscagcCfugcaUfgAfaCfcugucsasa | 89 | UACAGCCUGCAUGAACCUGUCAA | 665 | gsascaggUfuCfaUfgcaggcugua | 473 | GACAGGUUCAUGCAGGCUGUA |
| 000877 | | | | | | | | | |
| SRS- | 857 | 282 | usUfsugaaAfgccaGfgGfuGfcugucscsa | 90 | UUUGAAAGCCAGGGUGCUGUCCA | 666 | gsascagcAfcCfcUfggcuuucaaa | 474 | GACAGCACCCUGGCUUUCAAA |
| 000878 | | | | | | | | | |
| SRS- | 863 | 283 | usUfsagguGfuugaAfaGfcCfagggusgsc | 91 | UUAGGUGUUGAAAGCCAGGGUGC | 667 | ascsccugGfcUfuUfcaacaccuaa | 475 | ACCCUGGCUUUCAACACCUAA |
| 000879 | | | | | | | | | |
| SRS- | 867 | 284 | usGfsacguAfggugUfuGfaAfagccasgsg | 92 | UGACGUAGGUGUUGAAAGCCAGG | 668 | usgsgcuuUfcAfaCfaccuacguca | 476 | UGGCUUUCAACACCUACGUCA |
| 000880 | | | | | | | | | |
| SRS- | 868 | 285 | usGfsgacgUfagguGfuUfgAfaagccsasg | 93 | UGGACGUAGGUGUUGAAAGCCAG | 669 | gsgscuuuCfaAfcAfccuacgucca | 477 | GGCUUUCAACACCUACGUCCA |
| 000881 | | | | | | | | | |
| SRS- | 869 | 286 | usUfsggacGfuaggUfgUfuGfaaagcscsa | 94 | UUGGACGUAGGUGUUGAAAGCCA | 670 | gscsuuucAfaCfaCfcuacguccaa | 478 | GCUUUCAACACCUACGUCCAA |
| 000882 | | | | | | | | | |
| SRS- | 871 | 287 | usAfsguggAfcguaGfgUfgUfugaaasgsc | 95 | UAGUGGACGUAGGUGUUGAAAGC | 671 | ususucaaCfaCfcUfacguccacua | 479 | UUUCAACACCUACGUCCACUA |
| 000883 | | | | | | | | | |
| SRS- | 873 | 288 | usGfsaaguGfgacgUfaGfgUfguugasasa | 96 | UGAAGUGGACGUAGGUGUUGAAA | 672 | uscsaacaCfcUfaCfguccacuuca | 480 | UCAACACCUACGUCCACUUCA |
| 000884 | | | | | | | | | |
| SRS- | 874 | 289 | usGfsgaagUfggacGfuAfgGfuguugsasa | 97 | UGGAAGUGGACGUAGGUGUUGAA | 673 | csasacacCfuAfcGfuccacuucca | 481 | CAACACCUACGUCCACUUCCA |
| 000885 | | | | | | | | | |
| SRS- | 875 | 290 | usUfsggaaGfuggaCfgUfaGfguguusgsa | 98 | UUGGAAGUGGACGUAGGUGUUGA | 674 | asascaccUfaCfgUfccacuuccaa | 482 | AACACCUACGUCCACUUCCAA |
| 000886 | | | | | | | | | |
| SRS- | 881 | 291 | usUfsucccUfuggaAfgUfgGfacguasgsg | 99 | UUUCCCUUGGAAGUGGACGUAGG | 675 | usascgucCfaCfuUfccaagggaaa | 483 | UACGUCCACUUCCAAGGGAAA |
| 000887 | | | | | | | | | |
| SRS- | 938 | 292 | usGfsugcuGfuuguCfcAfcCfcagaascsu | 100 | UGUGCUGUUGUCCACCCAGAACU | 676 | ususcuggGfuGfgAfcaacagcaca | 484 | UUCUGGGUGGACAACAGCACA |
| 000888 | | | | | | | | | |
| SRS- | 1020 | 293 | usUfsugagUfcaccGfaGfaAfguuguscsc | 101 | UUUGAGUCACCGAGAAGUUGUCC | 677 | ascsaacuUfcUfcGfgugacucaaa | 485 | ACAACUUCUCGGUGACUCAAA |
| 000889 | | | | | | | | | |
| SRS- | 1021 | 294 | usCfsuugaGfucacCfgAfgAfaguugsusc | 102 | UCUUGAGUCACCGAGAAGUUGUC | 678 | csasacuuCfuCfgGfugacucaaga | 486 | CAACUUCUCGGUGACUCAAGA |
| 000890 | | | | | | | | | |
| SRS- | 1022 | 295 | usAfscuugAfgucaCfcGfaGfaaguusgsu | 103 | UACUUGAGUCACCGAGAAGUUGU | 679 | asascuucUfcGfgUfgacucaagua | 487 | AACUUCUCGGUGACUCAAGUA |
| 000891 | | | | | | | | | |
| SRS- | 1023 | 296 | usCfsacuuGfagucAfcCfgAfgaagususg | 104 | UCACUUGAGUCACCGAGAAGUUG | 680 | ascsuucuCfgGfuGfacucaaguga | 488 | ACUUCUCGGUGACUCAAGUGA |
| 000892 | | | | | | | | | |
| SRS- | 1024 | 297 | usGfscacuUfgaguCfaCfcGfagaagsusu | 105 | UGCACUUGAGUCACCGAGAAGUU | 681 | csusucucGfgUfgAfcucaagugca | 489 | CUUCUCGGUGACUCAAGUGCA |
| 000893 | | | | | | | | | |
| SRS- | 1026 | 298 | usGfsggcaCfuugaGfuCfaCfcgagasasg | 106 | UGGGCACUUGAGUCACCGAGAAG | 682 | uscsucggUfgAfcUfcaagugccca | 490 | UCUCGGUGACUCAAGUGCCCA |
| 000894 | | | | | | | | | |
| SRS- | 1027 | 299 | usAfsgggcAfcuugAfgUfcAfccgagsasa | 107 | UAGGGCACUUGAGUCACCGAGAA | 683 | csuscgguGfaCfuCfaagugcccua | 491 | CUCGGUGACUCAAGUGCCCUA |
| 000895 | | | | | | | | | |
| SRS- | 1029 | 300 | usGfsaaggGfcacuUfgAfgUfcaccgsasg | 108 | UGAAGGGCACUUGAGUCACCGAG | 684 | csgsgugaCfuCfaAfgugcccuuca | 492 | CGGUGACUCAAGUGCCCUUCA |
| 000896 | | | | | | | | | |
| SRS- | 1044 | 301 | usGfscaggCfgcucUfcAfgUfgaaggsgsc | 109 | UGCAGGCGCUCUCAGUGAAGGGC | 685 | cscsuucaCfuGfaGfagcgccugca | 493 | CCUUCACUGAGAGCGCCUGCA |
| 000897 | | | | | | | | | |
| SRS- | 1065 | 302 | usGfsugagGfcuggAfuCfaGfcagcasgsg | 110 | UGUGAGGCUGGAUCAGCAGCAGG | 686 | usgscugcUfgAfuCfcagccucaca | 494 | UGCUGCUGAUCCAGCCUCACA |
| 000898 | | | | | | | | | |
| SRS- | 1123 | 303 | usAfsguugAfgggaGfuUfuUfgcuggsasa | 111 | UAGUUGAGGGAGUUUUGCUGGAA | 687 | cscsagcaAfaAfcUfcccucaacua | 495 | CCAGCAAAACUCCCUCAACUA |
| 000899 | | | | | | | | | |
| SRS- | 1124 | 304 | usCfsaguuGfagggAfgUfuUfugcugsgsa | 112 | UCAGUUGAGGGAGUUUUGCUGGA | 688 | csasgcaaAfaCfuCfccucaacuga | 496 | CAGCAAAACUCCCUCAACUGA |
| 000900 | | | | | | | | | |
| SRS- | 1125 | 305 | usCfscaguUfgaggGfaGfuUfuugcusgsg | 113 | UCCAGUUGAGGGAGUUUUGCUGG | 689 | asgscaaaAfcUfcCfcucaacugga | 497 | AGCAAAACUCCCUCAACUGGA |
| 000901 | | | | | | | | | |
| SRS- | 1166 | 306 | usGfsgcauGfgucaGfgUfgGfaugguscsc | 114 | UGGCAUGGUCAGGUGGAUGGUCC | 690 | ascscaucCfaCfcUfgaccaugcca | 498 | ACCAUCCACCUGACCAUGCCA |
| 000902 | | | | | | | | | |
| SRS- | 1173 | 307 | usCfsaguuGfgggcAfuGfgUfcaggusgsg | 115 | UCAGUUGGGGCAUGGUCAGGUGG | 691 | ascscugaCfcAfuGfccccaacuga | 499 | ACCUGACCAUGCCCCAACUGA |
| 000903 | | | | | | | | | |
| SRS- | 1244 | 308 | usUfscgguGfugcaGfaAfuGfgcgggscsa | 116 | UUCGGUGUGCAGAAUGGCGGGCA | 692 | cscscgccAfuUfcUfgcacaccgaa | 500 | CCCGCCAUUCUGCACACCGAA |
| 000904 | | | | | | | | | |
| SRS- | 1257 | 309 | usUfsugcaGfguucAfgCfuCfggugusgsc | 117 | UUUGCAGGUUCAGCUCGGUGUGC | 693 | ascsaccgAfgCfuGfaaccugcaaa | 501 | ACACCGAGCUGAACCUGCAAA |
| 000905 | | | | | | | | | |
| SRS- | 1261 | 310 | usAfsuuuuUfgcagGfuUfcAfgcucgsgsu | 118 | UAUUUUUGCAGGUUCAGCUCGGU | 694 | csgsagcuGfaAfcCfugcaaaaaua | 502 | CGAGCUGAACCUGCAAAAAUA |
| 000906 | | | | | | | | | |
| SRS- | 1264 | 311 | usUfscaauUfuuugCfaGfgUfucagcsusc | 119 | UUCAAUUUUUGCAGGUUCAGCUC | 695 | gscsugaaCfcUfgCfaaaaauugaa | 503 | GCUGAACCUGCAAAAAUUGAA |
| 000907 | | | | | | | | | |
| SRS- | 1276 | 312 | usUfsgcggUfcauuGfcUfcAfauuuususg | 120 | UUGCGGUCAUUGCUCAAUUUUUG | 696 | asasaauuGfaGfcAfaugaccgcaa | 504 | AAAAUUGAGCAAUGACCGCAA |
| 000908 | | | | | | | | | |
| SRS- | 1352 | 313 | usUfsggguAfgacuCfuGfuGfggcucsusc | 121 | UUGGGUAGACUCUGUGGGCUCUC | 697 | gsasgcccAfcAfgAfgucuacccaa | 505 | GAGCCCACAGAGUCUACCCAA |
| 000909 | | | | | | | | | |
| SRS- | 1353 | 314 | usUfsugggUfagacUfcUfgUfgggcuscsu | 122 | UUUGGGUAGACUCUGUGGGCUCU | 698 | asgscccaCfaGfaGfucuacccaaa | 506 | AGCCCACAGAGUCUACCCAAA |
| 000910 | | | | | | | | | |
| SRS- | 1357 | 315 | usGfscuguUfggguAfgAfcUfcugugsgsg | 123 | UGCUGUUGGGUAGACUCUGUGGG | 699 | csascagaGfuCfuAfcccaacagca | 507 | CACAGAGUCUACCCAACAGCA |
| 000911 | | | | | | | | | |
| SRS- | 1397 | 316 | usGfsggcgGfuucaGfgGfuCfaccucscsa | 124 | UGGGCGGUUCAGGGUCACCUCCA | 700 | gsasggugAfcCfcUfgaaccgccca | 508 | GAGGUGACCCUGAACCGCCCA |
| 000912 | | | | | | | | | |
| SRS- | 1399 | 317 | usAfsugggCfgguuCfaGfgGfucaccsusc | 125 | UAUGGGCGGUUCAGGGUCACCUC | 701 | gsgsugacCfcUfgAfaccgcccaua | 509 | GGUGACCCUGAACCGCCCAUA |
| 000913 | | | | | | | | | |
| SRS- | 1400 | 318 | usAfsauggGfcgguUfcAfgGfgucacscsu | 126 | UAAUGGGCGGUUCAGGGUCACCU | 702 | gsusgaccCfuGfaAfccgcccauua | 510 | GUGACCCUGAACCGCCCAUUA |
| 000914 | | | | | | | | | |
| SRS- | 1405 | 319 | usAfscaggAfauggGfcGfgUfucaggsgsu | 127 | UACAGGAAUGGGCGGUUCAGGGU | 703 | cscsugaaCfcGfcCfcauuccugua | 511 | CCUGAACCGCCCAUUCCUGUA |
| 000915 | | | | | | | | | |
| SRS- | 1406 | 320 | usAfsacagGfaaugGfgCfgGfuucagsgsg | 128 | UAACAGGAAUGGGCGGUUCAGGG | 704 | csusgaacCfgCfcCfauuccuguua | 512 | CUGAACCGCCCAUUCCUGUUA |
| 000916 | | | | | | | | | |
| SRS- | 1408 | 321 | usCfsaaacAfggaaUfgGfgCfgguucsasg | 129 | UCAAACAGGAAUGGGCGGUUCAG | 705 | gsasaccgCfcCfaUfuccuguuuga | 513 | GAACCGCCCAUUCCUGUUUGA |
| 000917 | | | | | | | | | |
| SRS- | 1409 | 322 | usGfscaaaCfaggaAfuGfgGfcgguuscsa | 130 | UGCAAACAGGAAUGGGCGGUUCA | 706 | asasccgcCfcAfuUfccuguuugca | 514 | AACCGCCCAUUCCUGUUUGCA |
| 000918 | | | | | | | | | |
| SRS- | 1410 | 323 | usAfsgcaaAfcaggAfaUfgGfgcggususc | 131 | UAGCAAACAGGAAUGGGCGGUUC | 707 | ascscgccCfaUfuCfcuguuugcua | 515 | ACCGCCCAUUCCUGUUUGCUA |
| 000919 | | | | | | | | | |
| SRS- | 1420 | 324 | usGfsaucaUfacacAfgCfaAfacaggsasa | 132 | UGAUCAUACACAGCAAACAGGAA | 708 | cscsuguuUfgCfuGfuguaugauca | 516 | CCUGUUUGCUGUGUAUGAUCA |
| 000920 | | | | | | | | | |
| SRS- | 1426 | 325 | usCfsgcuuUfgaucAfuAfcAfcagcasasa | 133 | UCGCUUUGAUCAUACACAGCAAA | 709 | usgscuguGfuAfuGfaucaaagcga | 517 | UGCUGUGUAUGAUCAAAGCGA |
| 000921 | | | | | | | | | |
| SRS- | 1427 | 326 | usGfscgcuUfugauCfaUfaCfacagcsasa | 134 | UGCGCUUUGAUCAUACACAGCAA | 710 | gscsugugUfaUfgAfucaaagcgca | 518 | GCUGUGUAUGAUCAAAGCGCA |
| 000922 | | | | | | | | | |
| SRS- | 1428 | 327 | usGfsgcgcUfuugaUfcAfuAfcacagscsa | 135 | UGGCGCUUUGAUCAUACACAGCA | 711 | csusguguAfuGfaUfcaaagcgcca | 519 | CUGUGUAUGAUCAAAGCGCCA |
| 000923 | | | | | | | | | |
| SRS- | 1431 | 328 | usAfsguggCfgcuuUfgAfuCfauacascsa | 136 | UAGUGGCGCUUUGAUCAUACACA | 712 | usgsuaugAfuCfaAfagcgccacua | 520 | UGUAUGAUCAAAGCGCCACUA |
| 000924 | | | | | | | | | |
| SRS- | 1433 | 329 | usGfscaguGfgcgcUfuUfgAfucauascsa | 137 | UGCAGUGGCGCUUUGAUCAUACA | 713 | usasugauCfaAfaGfcgccacugca | 521 | UAUGAUCAAAGCGCCACUGCA |
| 000925 | | | | | | | | | |
| SRS- | 1435 | 330 | usGfsggcaGfuggcGfcUfuUfgaucasusa | 138 | UGGGCAGUGGCGCUUUGAUCAUA | 714 | usgsaucaAfaGfcGfccacugccca | 522 | UGAUCAAAGCGCCACUGCCCA |
| 000926 | | | | | | | | | |
| SRS- | 1436 | 331 | usAfsgggcAfguggCfgCfuUfugaucsasu | 139 | UAGGGCAGUGGCGCUUUGAUCAU | 715 | gsasucaaAfgCfgCfcacugcccua | 523 | GAUCAAAGCGCCACUGCCCUA |
| 000927 | | | | | | | | | |
| SRS- | 1437 | 332 | usCfsagggCfagugGfcGfcUfuugauscsa | 140 | UCAGGGCAGUGGCGCUUUGAUCA | 716 | asuscaaaGfcGfcCfacugcccuga | 524 | AUCAAAGCGCCACUGCCCUGA |
| 000928 | | | | | | | | | |
| SRS- | 1466 | 333 | usAfsgcggGfuuggCfcAfcGfcggccscsa | 141 | UAGCGGGUUGGCCACGCGGCCCA | 717 | gsgsccgcGfuGfgCfcaacccgcua | 525 | GGCCGCGUGGCCAACCCGCUA |
| 000929 | | | | | | | | | |
| SRS- | 1479 | 334 | usUfscaugCfugugCfuCfaGfcgggususg | 142 | UUCAUGCUGUGCUCAGCGGGUUG | 718 | ascsccgcUfgAfgCfacagcaugaa | 526 | ACCCGCUGAGCACAGCAUGAA |
| 000930 | | | | | | | | | |
| SRS- | 1544 | 335 | usCfsuggcCfuuugCfcUfcAfaaggcscsa | 143 | UCUGGCCUUUGCCUCAAAGGCCA | 719 | gscscuuuGfaGfgCfaaaggccaga | 527 | GCCUUUGAGGCAAAGGCCAGA |
| 000931 | | | | | | | | | |
| SRS- | 1545 | 336 | usGfscuggCfcuuuGfcCfuCfaaaggscsc | 144 | UGCUGGCCUUUGCCUCAAAGGCC | 720 | cscsuuugAfgGfcAfaaggccagca | 528 | CCUUUGAGGCAAAGGCCAGCA |
| 000932 | | | | | | | | | |
| SRS- | 1566 | 337 | usUfsguccGfggguUfgUfuAfucugcsusg | 145 | UUGUCCGGGGUUGUUAUCUGCUG | 721 | gscsagauAfaCfaAfccccggacaa | 529 | GCAGAUAACAACCCCGGACAA |
| 000933 | | | | | | | | | |
| SRS- | 1616 | 338 | usCfsgacuCfauuaGfaAfgAfaaaggsusg | 146 | UCGACUCAUUAGAAGAAAAGGUG | 722 | cscsuuuuCfuUfcUfaaugagucga | 530 | CCUUUUCUUCUAAUGAGUCGA |
| 000934 | | | | | | | | | |
| SRS- | 1617 | 339 | usUfscgacUfcauuAfgAfaGfaaaagsgsu | 147 | UUCGACUCAUUAGAAGAAAAGGU | 723 | csusuuucUfuCfuAfaugagucgaa | 531 | CUUUUCUUCUAAUGAGUCGAA |
| 000935 | | | | | | | | | |
| SRS- | 1618 | 340 | usGfsucgaCfucauUfaGfaAfgaaaasgsg | 148 | UGUCGACUCAUUAGAAGAAAAGG | 724 | ususuucuUfcUfaAfugagucgaca | 532 | UUUUCUUCUAAUGAGUCGACA |
| 000936 | | | | | | | | | |
| SRS- | 1619 | 341 | usAfsgucgAfcucaUfuAfgAfagaaasasg | 149 | UAGUCGACUCAUUAGAAGAAAAG | 725 | ususucuuCfuAfaUfgagucgacua | 533 | UUUCUUCUAAUGAGUCGACUA |
| 000937 | | | | | | | | | |
| SRS- | 1620 | 342 | usAfsagucGfacucAfuUfaGfaagaasasa | 150 | UAAGUCGACUCAUUAGAAGAAAA | 726 | ususcuucUfaAfuGfagucgacuua | 534 | UUCUUCUAAUGAGUCGACUUA |
| 000938 | | | | | | | | | |
| SRS- | 1623 | 343 | usUfscaaaGfucgaCfuCfaUfuagaasgsa | 151 | UUCAAAGUCGACUCAUUAGAAGA | 727 | ususcuaaUfgAfgUfcgacuuugaa | 535 | UUCUAAUGAGUCGACUUUGAA |
| 000939 | | | | | | | | | |
| SRS- | 1639 | 344 | usAfscggcUfgcuuUfcCfaGfcucaasasg | 152 | UACGGCUGCUUUCCAGCUCAAAG | 728 | ususgagcUfgGfaAfagcagccgua | 536 | UUGAGCUGGAAAGCAGCCGUA |
| 000940 | | | | | | | | | |
| SRS- | 1652 | 345 | usAfsgaccAfaggaGfaAfaCfggcugscsu | 153 | UAGACCAAGGAGAAACGGCUGCU | 729 | csasgccgUfuUfcUfccuuggucua | 537 | CAGCCGUUUCUCCUUGGUCUA |
| 000941 | | | | | | | | | |
| SRS- | 1655 | 346 | usCfsuuagAfccaaGfgAfgAfaacggscsu | 154 | UCUUAGACCAAGGAGAAACGGCU | 730 | cscsguuuCfuCfcUfuggucuaaga | 538 | CCGUUUCUCCUUGGUCUAAGA |
| 000942 | | | | | | | | | |
| SRS- | 1656 | 347 | usAfscuuaGfaccaAfgGfaGfaaacgsgsc | 155 | UACUUAGACCAAGGAGAAACGGC | 731 | csgsuuucUfcCfuUfggucuaagua | 539 | CGUUUCUCCUUGGUCUAAGUA |
| 000943 | | | | | | | | | |
| SRS- | 1766 | 348 | usCfsgcuaAfacacUfgGfuUfcuugcscsu | 156 | UCGCUAAACACUGGUUCUUGCCU | 732 | gscsaagaAfcCfaGfuguuuagcga | 540 | GCAAGAACCAGUGUUUAGCGA |
| 000944 | | | | | | | | | |
| SRS- | 1767 | 349 | usGfscgcuAfaacaCfuGfgUfucuugscsc | 157 | UGCGCUAAACACUGGUUCUUGCC | 733 | csasagaaCfcAfgUfguuuagcgca | 541 | CAAGAACCAGUGUUUAGCGCA |
| 000945 | | | | | | | | | |
| SRS- | 1768 | 350 | usCfsgcgcUfaaacAfcUfgGfuucuusgsc | 158 | UCGCGCUAAACACUGGUUCUUGC | 734 | asasgaacCfaGfuGfuuuagcgcga | 542 | AAGAACCAGUGUUUAGCGCGA |
| 000946 | | | | | | | | | |
| SRS- | 1771 | 351 | usUfscccgCfgcuaAfaCfaCfugguuscsu | 159 | UUCCCGCGCUAAACACUGGUUCU | 735 | asasccagUfgUfuUfagcgcgggaa | 543 | AACCAGUGUUUAGCGCGGGAA |
| 000947 | | | | | | | | | |
| SRS- | 1773 | 352 | usAfsguccCfgcgcUfaAfaCfacuggsusu | 160 | UAGUCCCGCGCUAAACACUGGUU | 736 | cscsagugUfuUfaGfcgcgggacua | 544 | CCAGUGUUUAGCGCGGGACUA |
| 000948 | | | | | | | | | |
| SRS- | 1775 | 353 | usGfsuaguCfccgcGfcUfaAfacacusgsg | 161 | UGUAGUCCCGCGCUAAACACUGG | 737 | asgsuguuUfaGfcGfcgggacuaca | 545 | AGUGUUUAGCGCGGGACUACA |
| 000949 | | | | | | | | | |
| SRS- | 1780 | 354 | usGfsaacaGfuaguCfcCfgCfgcuaasasc | 162 | UGAACAGUAGUCCCGCGCUAAAC | 738 | ususagcgCfgGfgAfcuacuguuca | 546 | UUAGCGCGGGACUACUGUUCA |
| 000950 | | | | | | | | | |
| SRS- | 1781 | 355 | usGfsgaacAfguagUfcCfcGfcgcuasasa | 163 | UGGAACAGUAGUCCCGCGCUAAA | 739 | usasgcgcGfgGfaCfuacuguucca | 547 | UAGCGCGGGACUACUGUUCCA |
| 000951 | | | | | | | | | |
| SRS- | 1783 | 356 | usUfsuggaAfcaguAfgUfcCfcgcgcsusa | 164 | UUUGGAACAGUAGUCCCGCGCUA | 740 | gscsgcggGfaCfuAfcuguuccaaa | 548 | GCGCGGGACUACUGUUCCAAA |
| 000952 | | | | | | | | | |
| SRS- | 1800 | 357 | usGfsucggUfuggaAfuUfcUfuuuugsgsa | 165 | UGUCGGUUGGAAUUCUUUUUGGA | 741 | csasaaaaGfaAfuUfccaaccgaca | 549 | CAAAAAGAAUUCCAACCGACA |
| 000953 | | | | | | | | | |
| SRS- | 1801 | 358 | usGfsgucgGfuuggAfaUfuCfuuuuusgsg | 166 | UGGUCGGUUGGAAUUCUUUUUGG | 742 | asasaaagAfaUfuCfcaaccgacca | 550 | AAAAAGAAUUCCAACCGACCA |
| 000954 | | | | | | | | | |
| SRS- | 1805 | 359 | usAfsgcugGfucggUfuGfgAfauucususu | 167 | UAGCUGGUCGGUUGGAAUUCUUU | 743 | asgsaauuCfcAfaCfcgaccagcua | 551 | AGAAUUCCAACCGACCAGCUA |
| 000955 | | | | | | | | | |
| SRS- | 1806 | 360 | usAfsagcuGfgucgGfuUfgGfaauucsusu | 168 | UAAGCUGGUCGGUUGGAAUUCUU | 744 | gsasauucCfaAfcCfgaccagcuua | 552 | GAAUUCCAACCGACCAGCUUA |
| 000956 | | | | | | | | | |
| SRS- | 1807 | 361 | usCfsaagcUfggucGfgUfuGfgaauuscsu | 169 | UCAAGCUGGUCGGUUGGAAUUCU | 745 | asasuuccAfaCfcGfaccagcuuga | 553 | AAUUCCAACCGACCAGCUUGA |
| 000957 | | | | | | | | | |
| SRS- | 1808 | 362 | usAfscaagCfugguCfgGfuUfggaaususc | 170 | UACAAGCUGGUCGGUUGGAAUUC | 746 | asusuccaAfcCfgAfccagcuugua | 554 | AUUCCAACCGACCAGCUUGUA |
| 000958 | | | | | | | | | |
| SRS- | 1809 | 363 | usAfsacaaGfcuggUfcGfgUfuggaasusu | 171 | UAACAAGCUGGUCGGUUGGAAUU | 747 | ususccaaCfcGfaCfcagcuuguua | 555 | UUCCAACCGACCAGCUUGUUA |
| 000959 | | | | | | | | | |
| SRS- | 1810 | 364 | usAfsaacaAfgcugGfuCfgGfuuggasasu | 172 | UAAACAAGCUGGUCGGUUGGAAU | 748 | uscscaacCfgAfcCfagcuuguuua | 556 | UCCAACCGACCAGCUUGUUUA |
| 000960 | | | | | | | | | |
| SRS- | 1905 | 365 | usUfsaaauAfcaaaCfcGfaAfggcaasusg | 173 | UUAAAUACAAACCGAAGGCAAUG | 749 | ususgccuUfcGfgUfuuguauuuaa | 557 | UUGCCUUCGGUUUGUAUUUAA |
| 000961 | | | | | | | | | |
| SRS- | 1911 | 366 | usAfsgacaCfuaaaUfaCfaAfaccgasasg | 174 | UAGACACUAAAUACAAACCGAAG | 750 | uscsgguuUfgUfaUfuuagugucua | 558 | UCGGUUUGUAUUUAGUGUCUA |
| 000962 | | | | | | | | | |
| SRS- | 1934 | 367 | usCfsggagGfucauGfuUfcUfuacaususc | 175 | UCGGAGGUCAUGUUCUUACAUUC | 751 | asusguaaGfaAfcAfugaccuccga | 559 | AUGUAAGAACAUGACCUCCGA |
| 000963 | | | | | | | | | |
| SRS- | 1940 | 368 | usAfscuacAfcggaGfgUfcAfuguucsusu | 176 | UACUACACGGAGGUCAUGUUCUU | 752 | gsasacauGfaCfcUfccguguagua | 560 | GAACAUGACCUCCGUGUAGUA |
| 000964 | | | | | | | | | |
| SRS- | 1947 | 369 | usUfsacagAfcacuAfcAfcGfgagguscsa | 177 | UUACAGACACUACACGGAGGUCA | 753 | ascscuccGfuGfuAfgugucuguaa | 561 | ACCUCCGUGUAGUGUCUGUAA |
| 000965 | | | | | | | | | |
| SRS- | 1955 | 370 | usUfsaaggUfauuaCfaGfaCfacuacsasc | 178 | UUAAGGUAUUACAGACACUACAC | 754 | gsusagugUfcUfgUfaauaccuuaa | 562 | GUAGUGUCUGUAAUACCUUAA |
| 000966 | | | | | | | | | |
| SRS- | 2000 | 371 | usUfscuuuCfacguAfuUfgUfucaaasasa | 179 | UUCUUUCACGUAUUGUUCAAAAA | 755 | ususugaaCfaAfuAfcgugaaagaa | 563 | UUUGAACAAUACGUGAAAGAA |
| 000967 | | | | | | | | | |
| SRS- | 2001 | 372 | usAfsucuuUfcacgUfaUfuGfuucaasasa | 180 | UAUCUUUCACGUAUUGUUCAAAA | 756 | ususgaacAfaUfaCfgugaaagaua | 564 | UUGAACAAUACGUGAAAGAUA |
| 000968 | | | | | | | | | |
| SRS- | 2002 | 373 | usCfsaucuUfucacGfuAfuUfguucasasa | 181 | UCAUCUUUCACGUAUUGUUCAAA | 757 | usgsaacaAfuAfcGfugaaagauga | 565 | UGAACAAUACGUGAAAGAUGA |
| 000969 | | | | | | | | | |
| SRS- | 2003 | 374 | usGfscaucUfuucaCfgUfaUfuguucsasa | 182 | UGCAUCUUUCACGUAUUGUUCAA | 758 | gsasacaaUfaCfgUfgaaagaugca | 566 | GAACAAUACGUGAAAGAUGCA |
| 000970 | | | | | | | | | |
| SRS- | 2005 | 375 | usUfsugcaUfcuuuCfaCfgUfauugususc | 183 | UUUGCAUCUUUCACGUAUUGUUC | 759 | ascsaauaCfgUfgAfaagaugcaaa | 567 | ACAAUACGUGAAAGAUGCAAA |
| 000971 | | | | | | | | | |
| SRS- | 2014 | 376 | usUfsucagGfugcuUfgCfaUfcuuucsasc | 184 | UUUCAGGUGCUUGCAUCUUUCAC | 760 | gsasaagaUfgCfaAfgcaccugaaa | 568 | GAAAGAUGCAAGCACCUGAAA |
| 000972 | | | | | | | | | |
| SRS- | 2030 | 377 | usCfsgcauUfcaaaCfaGfaAfauucasgsg | 185 | UCGCAUUCAAACAGAAAUUCAGG | 761 | usgsaauuUfcUfgUfuugaaugcga | 569 | UGAAUUUCUGUUUGAAUGCGA |
| 000973 | | | | | | | | | |
| SRS- | 2074 | 378 | usGfsacguUfuauuAfcUfaAfcacaasgsg | 186 | UGACGUUUAUUACUAACACAAGG | 762 | ususguguUfaGfuAfauaaacguca | 570 | UUGUGUUAGUAAUAAACGUCA |
| 000974 | | | | | | | | | |
| SRS- | 2076 | 379 | usAfsagacGfuuuaUfuAfcUfaacacsasa | 187 | UAAGACGUUUAUUACUAACACAA | 763 | gsusguuaGfuAfaUfaaacgucuua | 571 | GUGUUAGUAAUAAACGUCUUA |
| 000975 | | | | | | | | | |
| SRS- | 2083 | 380 | usUfsugugGfcaagAfcGfuUfuauuascsu | 188 | UUUGUGGCAAGACGUUUAUUACU | 764 | usasauaaAfcGfuCfuugccacaaa | 572 | UAAUAAACGUCUUGCCACAAA |
| 000976 | | | | | | | | | |
| SRS- | 2084 | 381 | usAfsuuguGfgcaaGfaCfgUfuuauusasc | 189 | UAUUGUGGCAAGACGUUUAUUAC | 765 | asasuaaaCfgUfcUfugccacaaua | 573 | AAUAAACGUCUUGCCACAAUA |
| 000977 | | | | | | | | | |
| SRS- | 2087 | 382 | usCfsuuauUfguggCfaAfgAfcguuusasu | 190 | UCUUAUUGUGGCAAGACGUUUAU | 766 | asasacguCfuUfgCfcacaauaaga | 574 | AAACGUCUUGCCACAAUAAGA |
| 000978 | | | | | | | | | |
| SRS- | 2088 | 383 | usGfscuuaUfugugGfcAfaGfacguususa | 191 | UGCUUAUUGUGGCAAGACGUUUA | 767 | asascgucUfuGfcCfacaauaagca | 575 | AACGUCUUGCCACAAUAAGCA |
| 000979 | | | | | | | | | |
| SRS- | 2089 | 384 | usGfsgcuuAfuuguGfgCfaAfgacgususu | 192 | UGGCUUAUUGUGGCAAGACGUUU | 768 | ascsgucuUfgCfcAfcaauaagcca | 576 | ACGUCUUGCCACAAUAAGCCA |
| 000980 | | | | | | | | | |

Note:
the target position is relative to human transcript NM_001384479.1; the corresponding sequence of a certain SEQ ID NO. is located on its right column of the same row. “A” refers to adenosine-3′-phosphate; “a” refers to 2′-O-methyladenosine-3′-phosphate; “Af” refers to 2′-fluoroadenosine-3′-phosphate; “dA” refers to 2′-deoxyadenosine-3-phosphate; “C” refers to cytidine-3′-phosphate; “c” refers to 2′-O-methylcytidine-3′-phosphate; “Cf” refers to 2′-fluorocytidine-3′-phosphate; “dC” refers to 2′-deoxycytidine-3′-phosphate; “G” refers to guanosine-3′-phosphate; “g” refers to 2′-O-methylguanosine-3′-phosphate; “Gf” refers to 2′-fluoroguanosine-3′-phosphate; “dG” refers to 2′-deoxyguanosine-3′-phosphate; “U” refers to uridine-3′-phosphate; “u” refers to 2′-O-methyluridine-3′-phosphate; “Uf” refers to 2′-fluorouridine-3′-phosphate; “T” refers to 5-methyluridine-3′-phosphate; “t” refers to 2′-O-methyl-5-methyluridine-3′-phosphate; “Tf” refers to 2′-fluoro-5-methyluridine-3′-phosphate; “dT” refers to 2′-deoxythymidine-3′-phosphate; “s” refers to 3′-phosphorothioate. Note that, in some instances, the passenger strand sequence is coupled to a targeting moiety (e.g., GalNAc or galactose (e.g., L96)) at the 3′ end of the passenger strand.

TABLE 2
In Vitro Efficacy of Candidate siRNAs

| | | | | | | 0.5 uM MV | |
|---|---|---|---|---|---|---|---|
| | | | | 10 uM MV | | quadruplicates | |
| | | | | quadruplicates | | [% residual | |
| Duplex | Target | | | [% residual | 10 uM SD | target | 0.5 uM SD |
| ID | Position | Passenger Strand Sequence | Guide Strand Sequence | target mRNA] | quadruplicates | mRNA] | quadruplicates |
| SRS- | 36 | asgsgguaUfgCfgGfaagcgagcaa | usUfsgcucGfcuucCfgCfaUfacccususc | 21.9 | 0.4 | 31.7 | 1.6 |
| 000789 | | | | | | | |
| SRS- | 37 | gsgsguauGfcGfgAfagcgagcaca | usGfsugcuCfgcuuCfcGfcAfuacccsusu | 87.2 | 13.2 | 88.7 | 2.9 |
| 000790 | | | | | | | |
| SRS- | 39 | gsusaugcGfgAfaGfcgagcaccca | usGfsggugCfucgcUfuCfcGfcauacscsc | 85.7 | 4.9 | 81.3 | 4.9 |
| 000791 | | | | | | | |
| SRS- | 41 | asusgcggAfaGfcGfagcaccccaa | usUfsggggUfgcucGfcUfuCfcgcausasc | 42.9 | 3.2 | 51.0 | 4.1 |
| 000792 | | | | | | | |
| SRS- | 65 | gsasgaugGfcUfcCfugccggugua | usAfscaccGfgcagGfaGfcCfaucucsasg | 47.6 | 8.0 | 59.4 | 6.8 |
| 000793 | | | | | | | |
| SRS- | 135 | csasggugAfcCfgGfguguacauaa | usUfsauguAfcaccCfgGfuCfaccugscsa | 94.1 | 2.0 | 86.7 | 3.5 |
| 000794 | | | | | | | |
| SRS- | 140 | gsasccggGfuGfuAfcauacaccca | usGfsggugUfauguAfcAfcCfcggucsasc | 103.1 | 12.0 | 96.4 | 5.9 |
| 000795 | | | | | | | |
| SRS- | 142 | cscsggguGfuAfcAfuacaccccua | usAfsggggUfguauGfuAfcAfcccggsusc | 82.3 | 7.3 | 82.7 | 2.8 |
| 000796 | | | | | | | |
| SRS- | 143 | csgsggugUfaCfaUfacaccccuua | usAfsagggGfuguaUfgUfaCfacccgsgsu | 55.4 | 5.7 | 64.2 | 4.2 |
| 000797 | | | | | | | |
| SRS- | 144 | gsgsguguAfcAfuAfcaccccuuca | usGfsaaggGfguguAfuGfuAfcacccsgsg | 109.4 | 10.4 | 102.9 | 6.1 |
| 000798 | | | | | | | |
| SRS- | 148 | gsusacauAfcAfcCfccuuccacca | usGfsguggAfagggGfuGfuAfuguacsasc | 97.7 | 6.4 | 98.9 | 11.5 |
| 000799 | | | | | | | |
| SRS- | 149 | usascauaCfaCfcCfcuuccaccua | usAfsggugGfaaggGfgUfgUfauguascsa | 97.9 | 3.2 | 85.3 | 5.2 |
| 000800 | | | | | | | |
| SRS- | 167 | csuscgucAfuCfcAfcaaugagaga | usCfsucucAfuuguGfgAfuGfacgagsgsu | 40.1 | 3.0 | 56.2 | 2.2 |
| 000801 | | | | | | | |
| SRS- | 170 | gsuscaucCfaCfaAfugagaguaca | usGfsuacuCfucauUfgUfgGfaugacsgsa | 12.6 | 0.7 | 17.9 | 1.8 |
| 000802 | | | | | | | |
| SRS- | 171 | uscsauccAfcAfaUfgagaguacca | usGfsguacUfcucaUfuGfuGfgaugascsg | 92.1 | 12.7 | 95.0 | 3.1 |
| 000803 | | | | | | | |
| SRS- | 172 | csasuccaCfaAfuGfagaguaccua | usAfsgguaCfucucAfuUfgUfggaugsasc | 24.7 | 2.7 | 34.7 | 3.2 |
| 000804 | | | | | | | |
| SRS- | 173 | asusccacAfaUfgAfgaguaccuga | usCfsagguAfcucuCfaUfuGfuggausgsa | 36.8 | 2.8 | 49.3 | 3.0 |
| 000805 | | | | | | | |
| SRS- | 175 | cscsacaaUfgAfgAfguaccuguga | usCfsacagGfuacuCfuCfaUfuguggsasu | 43.0 | 7.6 | 61.7 | 5.3 |
| 000806 | | | | | | | |
| SRS- | 181 | usgsagagUfaCfcUfgugagcagca | usGfscugcUfcacaGfgUfaCfucucasusu | 52.3 | 8.9 | 62.3 | 3.8 |
| 000807 | | | | | | | |
| SRS- | 200 | csusggcaAfaGfgCfcaaugccgga | usCfscggcAfuuggCfcUfuUfgccagscsu | 65.2 | 9.2 | 77.7 | 4.3 |
| 000808 | | | | | | | |
| SRS- | 203 | gscsaaagGfcCfaAfugccgggaaa | usUfsucccGfgcauUfgGfcCfuuugcscsa | 36.9 | 3.7 | 47.2 | 5.5 |
| 000809 | | | | | | | |
| SRS- | 254 | asusucagGfcCfaAfgacaucccca | usGfsgggaUfgucuUfgGfcCfugaaususg | 98.1 | 3.6 | 92.6 | 10.5 |
| 000810 | | | | | | | |
| SRS- | 255 | ususcaggCfcAfaGfacauccccua | usAfsggggAfugucUfuGfgCfcugaasusu | 101.0 | 7.9 | 93.9 | 8.9 |
| 000811 | | | | | | | |
| SRS- | 276 | usgsgaugAfaAfaGfgcccuacaga | usCfsuguaGfggccUfuUfuCfauccascsa | 95.8 | 4.1 | 91.9 | 7.7 |
| 000812 | | | | | | | |
| SRS- | 299 | csasgcugGfuGfcUfagucgcugca | usGfscagcGfacuaGfcAfcCfagcugsgsu | 36.6 | 1.6 | 53.0 | 1.9 |
| 000813 | | | | | | | |
| SRS- | 309 | usasgucgCfuGfcAfaaacuugaca | usGfsucaaGfuuuuGfcAfgCfgacuasgsc | 31.5 | 1.3 | 40.2 | 2.4 |
| 000814 | | | | | | | |
| SRS- | 313 | csgscugcAfaAfaCfuugacaccga | usCfsggugUfcaagUfuUfuGfcagcgsasc | 49.4 | 2.3 | 52.0 | 3.7 |
| 000815 | | | | | | | |
| SRS- | 314 | gscsugcaAfaAfcUfugacaccgaa | usUfscgguGfucaaGfuUfuUfgcagcsgsa | 13.5 | 0.7 | 17.9 | 2.1 |
| 000816 | | | | | | | |
| SRS- | 323 | csusugacAfcCfgAfagacaaguua | usAfsacuuGfucuuCfgGfuGfucaagsusu | 53.5 | 6.1 | 68.3 | 4.9 |
| 000817 | | | | | | | |
| SRS- | 324 | ususgacaCfcGfaAfgacaaguuga | usCfsaacuUfgucuUfcGfgUfgucaasgsu | 83.7 | 3.2 | 85.4 | 8.3 |
| 000818 | | | | | | | |
| SRS- | 325 | usgsacacCfgAfaGfacaaguugaa | usUfscaacUfugucUfuCfgGfugucasasg | 24.6 | 0.7 | 42.4 | 14.2 |
| 000819 | | | | | | | |
| SRS- | 326 | gsascaccGfaAfgAfcaaguugaga | usCfsucaaCfuuguCfuUfcGfgugucsasa | 56.1 | 2.4 | 64.3 | 12.9 |
| 000820 | | | | | | | |
| SRS- | 333 | asasgacaAfgUfuGfagggccgcaa | usUfsgcggCfccucAfaCfuUfgucuuscsg | 93.3 | 5.6 | 99.2 | 19.4 |
| 000821 | | | | | | | |
| SRS- | 334 | asgsacaaGfuUfgAfgggccgcaaa | usUfsugcgGfcccuCfaAfcUfugucususc | 65.3 | 2.2 | 67.2 | 10.3 |
| 000822 | | | | | | | |
| SRS- | 344 | asgsggccGfcAfaUfggucgggaua | usAfsucccGfaccaUfuGfcGfgcccuscsa | 92.7 | 6.5 | 107.0 | 9.5 |
| 000823 | | | | | | | |
| SRS- | 347 | gscscgcaAfuGfgUfcgggaugcua | usAfsgcauCfccgaCfcAfuUfgcggcscsc | 53.6 | 0.8 | 76.7 | 10.5 |
| 000824 | | | | | | | |
| SRS- | 352 | asasugguCfgGfgAfugcuggccaa | usUfsggccAfgcauCfcCfgAfccauusgsc | 66.0 | 2.8 | 81.9 | 10.1 |
| 000825 | | | | | | | |
| SRS- | 353 | asusggucGfgGfaUfgcuggccaaa | usUfsuggcCfagcaUfcCfcGfaccaususg | 86.5 | 4.7 | 96.6 | 11.7 |
| 000826 | | | | | | | |
| SRS- | 369 | cscsaacuUfcUfuGfggcuuccgua | usAfscggaAfgcccAfaGfaAfguuggscsc | 97.1 | 3.3 | 95.3 | 9.7 |
| 000827 | | | | | | | |
| SRS- | 370 | csasacuuCfuUfgGfgcuuccguaa | usUfsacggAfagccCfaAfgAfaguugsgsc | 51.4 | 4.4 | 61.8 | 6.5 |
| 000828 | | | | | | | |
| SRS- | 371 | asascuucUfuGfgGfcuuccguaua | usAfsuacgGfaagcCfcAfaGfaaguusgsg | 18.9 | 1.0 | 25.5 | 2.5 |
| 000829 | | | | | | | |
| SRS- | 373 | csusucuuGfgGfcUfuccguauaua | usAfsuauaCfggaaGfcCfcAfagaagsusu | 27.0 | 1.3 | 38.7 | 2.8 |
| 000830 | | | | | | | |
| SRS- | 374 | ususcuugGfgCfuUfccguauauaa | usUfsauauAfcggaAfgCfcCfaagaasgsu | 41.3 | 2.8 | 44.7 | 4.8 |
| 000831 | | | | | | | |
| SRS- | 375 | uscsuuggGfcUfuCfcguauauaua | usAfsuauaUfacggAfaGfcCfcaagasasg | 54.6 | 3.5 | 63.2 | 5.0 |
| 000832 | | | | | | | |
| SRS- | 376 | csusugggCfuUfcCfguauauauga | usCfsauauAfuacgGfaAfgCfccaagsasa | 48.9 | 11.9 | 65.1 | 5.4 |
| 000833 | | | | | | | |
| SRS- | 377 | ususgggcUfuCfcGfuauauaugga | usCfscauaUfauacGfgAfaGfcccaasgsa | 41.0 | 3.2 | 55.1 | 3.9 |
| 000834 | | | | | | | |
| SRS- | 379 | gsgsgcuuCfcGfuAfuauauggcaa | usUfsgccaUfauauAfcGfgAfagcccsasa | 71.2 | 4.0 | 81.0 | 8.4 |
| 000835 | | | | | | | |
| SRS- | 380 | gsgscuucCfgUfaUfauauggcaua | usAfsugccAfuauaUfaCfgGfaagccscsa | 12.0 | 2.5 | 21.2 | 2.2 |
| 000836 | | | | | | | |
| SRS- | 382 | csusuccgUfaUfaUfauggcaugca | usGfscaugCfcauaUfaUfaCfggaagscsc | 90.9 | 6.3 | 89.1 | 6.3 |
| 000837 | | | | | | | |
| SRS- | 383 | ususccguAfuAfuAfuggcaugcaa | usUfsgcauGfccauAfuAfuAfcggaasgsc | 58.3 | 4.9 | 75.7 | 5.0 |
| 000838 | | | | | | | |
| SRS- | 384 | uscscguaUfaUfaUfggcaugcaca | usGfsugcaUfgccaUfaUfaUfacggasasg | 82.2 | 2.2 | 84.9 | 8.4 |
| 000839 | | | | | | | |
| SRS- | 387 | gsusauauAfuGfgCfaugcacagua | usAfscuguGfcaugCfcAfuAfuauacsgsg | 44.7 | 10.7 | 65.0 | 11.1 |
| 000840 | | | | | | | |
| SRS- | 391 | asusauggCfaUfgCfacagugagca | usGfscucaCfugugCfaUfgCfcauausasu | 59.9 | 4.5 | 79.6 | 5.4 |
| 000841 | | | | | | | |
| SRS- | 393 | asusggcaUfgCfaCfagugagcuaa | usUfsagcuCfacugUfgCfaUfgccausasu | 90.3 | 7.7 | 98.1 | 4.7 |
| 000842 | | | | | | | |
| SRS- | 394 | usgsgcauGfcAfcAfgugagcuaua | usAfsuagcUfcacuGfuGfcAfugccasusa | 24.2 | 1.9 | 40.1 | 3.2 |
| 000843 | | | | | | | |
| SRS- | 401 | csascaguGfaGfcUfauggggcgua | usAfscgccCfcauaGfcUfcAfcugugscsa | 65.9 | 2.0 | 80.5 | 8.2 |
| 000844 | | | | | | | |
| SRS- | 402 | ascsagugAfgCfuAfuggggcguga | usCfsacgcCfccauAfgCfuCfacugusgsc | 97.2 | 4.2 | 100.6 | 4.2 |
| 000845 | | | | | | | |
| SRS- | 403 | csasgugaGfcUfaUfggggcgugga | usCfscacgCfcccaUfaGfcUfcacugsusg | 96.2 | 5.7 | 100.2 | 10.2 |
| 000846 | | | | | | | |
| SRS- | 405 | gsusgagcUfaUfgGfggcgugguca | usGfsaccaCfgcccCfaUfaGfcucacsusg | 99.0 | 8.9 | 96.5 | 7.6 |
| 000847 | | | | | | | |
| SRS- | 406 | usgsagcuAfuGfgGfgcguggucca | usGfsgaccAfcgccCfcAfuAfgcucascsu | 100.4 | 8.2 | 99.8 | 5.7 |
| 000848 | | | | | | | |
| SRS- | 407 | gsasgcuaUfgGfgGfcgugguccaa | usUfsggacCfacgcCfcCfaUfagcucsasc | 97.5 | 5.9 | 105.8 | 7.7 |
| 000849 | | | | | | | |
| SRS- | 410 | csusauggGfgCfgUfgguccaugga | usCfscaugGfaccaCfgCfcCfcauagscsu | 101.9 | 3.1 | 107.5 | 5.0 |
| 000850 | | | | | | | |
| SRS- | 418 | csgsugguCfcAfuGfgggccaccga | usCfsggugGfccccAfuGfgAfccacgscsc | 99.7 | 4.5 | 101.3 | 8.1 |
| 000851 | | | | | | | |
| SRS- | 444 | cscsccaaCfgGfcUfgucuuuggca | usGfsccaaAfgacaGfcCfgUfuggggsasg | 68.5 | 3.8 | 83.8 | 10.2 |
| 000852 | | | | | | | |
| SRS- | 447 | csasacggCfuGfuCfuuuggcacca | usGfsgugcCfaaagAfcAfgCfcguugsgsg | 94.2 | 2.8 | 90.4 | 5.2 |
| 000853 | | | | | | | |
| SRS- | 448 | asascggcUfgUfcUfuuggcaccca | usGfsggugCfcaaaGfaCfaGfccguusgsg | 97.8 | 7.7 | 84.4 | 7.1 |
| 000854 | | | | | | | |
| SRS- | 495 | ascscacaCfaGfcUfgacaggcuaa | usUfsagccUfgucaGfcUfgUfgugguscsc | 54.1 | 1.4 | 47.7 | 11.7 |
| 000855 | | | | | | | |
| SRS- | 496 | cscsacacAfgCfuGfacaggcuaca | usGfsuagcCfugucAfgCfuGfuguggsusc | 95.0 | 3.2 | 87.1 | 3.5 |
| 000856 | | | | | | | |
| SRS- | 497 | csascacaGfcUfgAfcaggcuacaa | usUfsguagCfcuguCfaGfcUfgugugsgsu | 85.5 | 5.3 | 74.7 | 3.9 |
| 000857 | | | | | | | |
| SRS- | 504 | csusgacaGfgCfuAfcaggcaauca | usGfsauugCfcuguAfgCfcUfgucagscsu | 93.6 | 7.9 | 78.5 | 4.9 |
| 000858 | | | | | | | |
| SRS- | 542 | gsascaagAfaCfuGfcaccucccga | usCfsgggaGfgugcAfgUfuCfuugucscsu | 95.2 | 5.1 | 109.1 | 13.0 |
| 000859 | | | | | | | |
| SRS- | 553 | csasccucCfcGfgCfuggaugcgca | usGfscgcaUfccagCfcGfgGfaggugscsa | 95.3 | 8.3 | 99.3 | 7.8 |
| 000860 | | | | | | | |
| SRS- | 557 | uscsccggCfuGfgAfugcgcacaaa | usUfsugugCfgcauCfcAfgCfcgggasgsg | 57.6 | 3.3 | 65.5 | 3.3 |
| 000861 | | | | | | | |
| SRS- | 558 | cscscggcUfgGfaUfgcgcacaaga | usCfsuuguGfcgcaUfcCfaGfccgggsasg | 101.7 | 8.8 | 96.7 | 1.9 |
| 000862 | | | | | | | |
| SRS- | 562 | gscsuggaUfgCfgCfacaaggucca | usGfsgaccUfugugCfgCfaUfccagcscsg | 81.9 | 1.0 | 89.3 | 0.3 |
| 000863 | | | | | | | |
| SRS- | 563 | csusggauGfcGfcAfcaagguccua | usAfsggacCfuuguGfcGfcAfuccagscsc | 91.0 | 6.9 | 93.7 | 4.3 |
| 000864 | | | | | | | |
| SRS- | 569 | gscsgcacAfaGfgUfccugucugca | usGfscagaCfaggaCfcUfuGfugcgcsasu | 97.0 | 6.4 | 92.2 | 6.2 |
| 000865 | | | | | | | |
| SRS- | 701 | csasgccgUfuUfgUfgcagggccua | usAfsggccCfugcaCfaAfaCfggcugscsu | 99.9 | 6.1 | 84.9 | 5.6 |
| 000866 | | | | | | | |
| SRS- | 712 | gscsagggCfcUfgGfcucucuauaa | usUfsauagAfgagcCfaGfgCfccugcsasc | 54.9 | 1.8 | 62.2 | 5.0 |
| 000867 | | | | | | | |
| SRS- | 719 | csusggcuCfuCfuAfuaccccugua | usAfscaggGfguauAfgAfgAfgccagsgsc | 78.5 | 6.2 | 77.2 | 4.2 |
| 000868 | | | | | | | |
| SRS- | 721 | gsgscucuCfuAfuAfccccugugga | usCfscacaGfggguAfuAfgAfgagccsasg | 96.1 | 2.2 | 88.9 | 5.9 |
| 000869 | | | | | | | |
| SRS- | 723 | csuscucuAfuAfcCfccugugguca | usGfsaccaCfagggGfuAfuAfgagagscsc | 97.0 | 6.8 | 71.8 | 21.7 |
| 000870 | | | | | | | |
| SRS- | 724 | uscsucuaUfaCfcCfcuguggucca | usGfsgaccAfcaggGfgUfaUfagagasgsc | 97.7 | 11.5 | 95.5 | 2.5 |
| 000871 | | | | | | | |
| SRS- | 726 | uscsuauaCfcCfcUfgugguccuca | usGfsaggaCfcacaGfgGfgUfauagasgsa | 94.9 | 7.5 | 93.4 | 5.0 |
| 000872 | | | | | | | |
| SRS- | 735 | csusguggUfcCfuCfccacgcucua | usAfsgagcGfugggAfgGfaCfcacagsgsg | 95.9 | 3.6 | 87.2 | 2.8 |
| 000873 | | | | | | | |
| SRS- | 746 | cscsacgcUfcUfcUfggacuucaca | usGfsugaaGfuccaGfaGfaGfcguggsgsa | 76.7 | 3.3 | 84.0 | 4.1 |
| 000874 | | | | | | | |
| SRS- | 751 | csuscucuGfgAfcUfucacagaaca | usGfsuucuGfugaaGfuCfcAfgagagscsg | 48.4 | 4.0 | 58.7 | 6.2 |
| 000875 | | | | | | | |
| SRS- | 784 | usgsagaaGfaUfuGfacagguucaa | usUfsgaacCfugucAfaUfcUfucucasgsc | 7.4 | 0.3 | 10.2 | 3.8 |
| 000876 | | | | | | | |
| SRS- | 794 | gsascaggUfuCfaUfgcaggcugua | usAfscagcCfugcaUfgAfaCfcugucsasa | 54.1 | 1.6 | 73.8 | 2.5 |
| 000877 | | | | | | | |
| SRS- | 857 | gsascagcAfcCfcUfggcuuucaaa | usUfsugaaAfgccaGfgGfuGfcugucscsa | 101.8 | 6.9 | 88.5 | 11.3 |
| 000878 | | | | | | | |
| SRS- | 863 | ascsccugGfcUfuUfcaacaccuaa | usUfsagguGfuugaAfaGfcCfagggusgsc | 61.8 | 2.8 | 62.4 | 2.7 |
| 000879 | | | | | | | |
| SRS- | 867 | usgsgcuuUfcAfaCfaccuacguca | usGfsacguAfggugUfuGfaAfagccasgsg | 98.1 | 6.9 | 74.9 | 20.7 |
| 000880 | | | | | | | |
| SRS- | 868 | gsgscuuuCfaAfcAfccuacgucca | usGfsgacgUfagguGfuUfgAfaagccsasg | 82.9 | 2.6 | 81.1 | 3.3 |
| 000881 | | | | | | | |
| SRS- | 869 | gscsuuucAfaCfaCfcuacguccaa | usUfsggacGfuaggUfgUfuGfaaagcscsa | 93.2 | 3.6 | 97.1 | 5.0 |
| 000882 | | | | | | | |
| SRS- | 871 | ususucaaCfaCfcUfacguccacua | usAfsguggAfcguaGfgUfgUfugaaasgsc | 39.5 | 1.3 | 42.9 | 8.3 |
| 000883 | | | | | | | |
| SRS- | 873 | uscsaacaCfcUfaCfguccacuuca | usGfsaaguGfgacgUfaGfgUfguugasasa | 95.1 | 4.5 | 100.4 | 4.6 |
| 000884 | | | | | | | |
| SRS- | 874 | csasacacCfuAfcGfuccacuucca | usGfsgaagUfggacGfuAfgGfuguugsasa | 65.9 | 5.3 | 76.2 | 5.3 |
| 000885 | | | | | | | |
| SRS- | 875 | asascaccUfaCfgUfccacuuccaa | usUfsggaaGfuggaCfgUfaGfguguusgsa | 76.9 | 9.7 | 75.4 | 13.6 |
| 000886 | | | | | | | |
| SRS- | 881 | usascgucCfaCfuUfccaagggaaa | usUfsucccUfuggaAfgUfgGfacguasgsg | 85.1 | 10.1 | 92.1 | 11.0 |
| 000887 | | | | | | | |
| SRS- | 938 | ususcuggGfuGfgAfcaacagcaca | usGfsugcuGfuuguCfcAfcCfcagaascsu | 75.2 | 2.0 | 83.7 | 9.4 |
| 000888 | | | | | | | |
| SRS- | 1020 | ascsaacuUfcUfcGfgugacucaaa | usUfsugagUfcaccGfaGfaAfguuguscsc | 86.1 | 4.0 | 88.9 | 2.7 |
| 000889 | | | | | | | |
| SRS- | 1021 | csasacuuCfuCfgGfugacucaaga | usCfsuugaGfucacCfgAfgAfaguugsusc | 35.5 | 1.7 | 48.9 | 2.5 |
| 000890 | | | | | | | |
| SRS- | 1022 | asascuucUfcGfgUfgacucaagua | usAfscuugAfgucaCfcGfaGfaaguusgsu | 97.5 | 5.1 | 103.1 | 5.8 |
| 000891 | | | | | | | |
| SRS- | 1023 | ascsuucuCfgGfuGfacucaaguga | usCfsacuuGfagucAfcCfgAfgaagususg | 91.2 | 5.3 | 97.2 | 2.3 |
| 000892 | | | | | | | |
| SRS- | 1024 | csusucucGfgUfgAfcucaagugca | usGfscacuUfgaguCfaCfcGfagaagsusu | 87.2 | 4.7 | 90.1 | 4.8 |
| 000893 | | | | | | | |
| SRS- | 1026 | uscsucggUfgAfcUfcaagugccca | usGfsggcaCfuugaGfuCfaCfcgagasasg | 65.0 | 2.0 | 73.7 | 4.0 |
| 000894 | | | | | | | |
| SRS- | 1027 | csuscgguGfaCfuCfaagugcccua | usAfsgggcAfcuugAfgUfcAfccgagsasa | 70.5 | 3.9 | 82.5 | 7.9 |
| 000895 | | | | | | | |
| SRS- | 1029 | csgsgugaCfuCfaAfgugcccuuca | usGfsaaggGfcacuUfgAfgUfcaccgsasg | 42.7 | 12.2 | 42.2 | 12.3 |
| 000896 | | | | | | | |
| SRS | 1044 | cscsuucaCfuGfaGfagcgccugca | usGfscaggCfgcucUfcAfgUfgaaggsgsc | 93.7 | 12.0 | 92.8 | 5.7 |
| 000897 | | | | | | | |
| SRS- | 1065 | usgscugcUfgAfuCfcagccucaca | usGfsugagGfcuggAfuCfaGfcagcasgsg | 68.4 | 1.3 | 70.7 | 3.8 |
| 000898 | | | | | | | |
| SRS- | 1123 | cscsagcaAfaAfcUfcccucaacua | usAfsguugAfgggaGfuUfuUfgcuggsasa | 33.8 | 2.5 | 43.8 | 0.7 |
| 000899 | | | | | | | |
| SRS- | 1124 | csasgcaaAfaCfuCfccucaacuga | usCfsaguuGfagggAfgUfuUfugcugsgsa | 96.1 | 8.4 | 101.3 | 3.4 |
| 000900 | | | | | | | |
| SRS- | 1125 | asgscaaaAfcUfcCfcucaacugga | usCfscaguUfgaggGfaGfuUfuugcusgsg | 97.5 | 7.7 | 100.7 | 3.1 |
| 000901 | | | | | | | |
| SRS- | 1166 | ascscaucCfaCfcUfgaccaugcca | usGfsgcauGfgucaGfgUfgGfaugguscsc | 90.5 | 2.9 | 96.9 | 4.7 |
| 000902 | | | | | | | |
| SRS | 1173 | ascscugaCfcAfuGfccccaacuga | usCfsaguuGfgggcAfuGfgUfcaggusgsg | 89.5 | 2.3 | 99.5 | 3.7 |
| 000903 | | | | | | | |
| SRS- | 1244 | cscscgccAfuUfcUfgcacaccgaa | usUfscgguGfugcaGfaAfuGfgcgggscsa | 50.6 | 2.1 | 62.8 | 5.1 |
| 000904 | | | | | | | |
| SRS- | 1257 | ascsaccgAfgCfuGfaaccugcaaa | usUfsugcaGfguucAfgCfuCfggugusgsc | 79.4 | 10.0 | 97.6 | 4.1 |
| 000905 | | | | | | | |
| SRS- | 1261 | csgsagcuGfaAfcCfugcaaaaaua | usAfsuuuuUfgcagGfuUfcAfgcucgsgsu | 10.0 | 0.2 | 13.9 | 0.9 |
| 000906 | | | | | | | |
| SRS- | 1264 | gscsugaaCfcUfgCfaaaaauugaa | usUfscaauUfuuugCfaGfgUfucagcsusc | 50.4 | 1.5 | 58.5 | 1.6 |
| 000907 | | | | | | | |
| SRS- | 1276 | asasaauuGfaGfcAfaugaccgcaa | usUfsgcggUfcauuGfcUfcAfauuuususg | 25.2 | 1.8 | 32.5 | 2.3 |
| 000908 | | | | | | | |
| SRS- | 1352 | gsasgcccAfcAfgAfgucuacccaa | usUfsggguAfgacuCfuGfuGfggcucsusc | 98.4 | 2.9 | 103.4 | 11.2 |
| 000909 | | | | | | | |
| SRS- | 1353 | asgscccaCfaGfaGfucuacccaaa | usUfsugggUfagacUfcUfgUfgggcuscsu | 16.6 | 1.2 | 20.3 | 1.5 |
| 000910 | | | | | | | |
| SRS- | 1357 | csascagaGfuCfuAfcccaacagca | usGfscuguUfggguAfgAfcUfcugugsgsg | 95.4 | 5.5 | 98.3 | 5.5 |
| 000911 | | | | | | | |
| SRS- | 1397 | gsasggugAfcCfcUfgaaccgccca | usGfsggcgGfuucaGfgGfuCfaccucscsa | 91.6 | 5.3 | 95.6 | 3.0 |
| 000912 | | | | | | | |
| SRS- | 1399 | gsgsugacCfcUfgAfaccgcccaua | usAfsugggCfgguuCfaGfgGfucaccsusc | 94.1 | 4.0 | 87.1 | 4.4 |
| 000913 | | | | | | | |
| SRS- | 1400 | gsusgaccCfuGfaAfccgcccauua | usAfsauggGfcgguUfcAfgGfgucacscsu | 42.7 | 2.0 | 54.7 | 1.5 |
| 000914 | | | | | | | |
| SRS- | 1405 | cscsugaaCfcGfcCfcauuccugua | usAfscaggAfauggGfcGfgUfucaggsgsu | 50.9 | 5.4 | 68.9 | 3.2 |
| 000915 | | | | | | | |
| SRS- | 1406 | csusgaacCfgCfcCfauuccuguua | usAfsacagGfaaugGfgCfgGfuucagsgsg | 30.8 | 1.9 | 49.2 | 2.0 |
| 000916 | | | | | | | |
| SRS- | 1408 | gsasaccgCfcCfaUfuccuguuuga | usCfsaaacAfggaaUfgGfgCfgguucsasg | 89.9 | 4.6 | 95.7 | 4.2 |
| 000917 | | | | | | | |
| SRS- | 1409 | asasccgcCfcAfuUfccuguuugca | usGfscaaaCfaggaAfuGfgGfcgguuscsa | 100.2 | 7.1 | 98.6 | 5.3 |
| 000918 | | | | | | | |
| SRS- | 1410 | ascscgccCfaUfuCfcuguuugcua | usAfsgcaaAfcaggAfaUfgGfgcggususc | 54.4 | 5.2 | 64.7 | 2.6 |
| 000919 | | | | | | | |
| SRS- | 1420 | cscsuguuUfgCfuGfuguaugauca | usGfsaucaUfacacAfgCfaAfacaggsasa | 19.8 | 0.6 | 33.5 | 1.6 |
| 000920 | | | | | | | |
| SRS- | 1426 | usgscuguGfuAfuGfaucaaagcga | usCfsgcuuUfgaucAfuAfcAfcagcasasa | 93.8 | 8.1 | 97.2 | 5.4 |
| 000921 | | | | | | | |
| SRS- | 1427 | gscsugugUfaUfgAfucaaagcgca | usGfscgcuUfugauCfaUfaCfacagcsasa | 48.7 | 0.8 | 63.4 | 1.3 |
| 000922 | | | | | | | |
| SRS- | 1428 | csusguguAfuGfaUfcaaagcgcca | usGfsgcgcUfuugaUfcAfuAfcacagscsa | 31.6 | 2.4 | 44.3 | 1.1 |
| 000923 | | | | | | | |
| SRS- | 1431 | usgsuaugAfuCfaAfagcgccacua | usAfsguggCfgcuuUfgAfuCfauacascsa | 41.4 | 2.7 | 57.6 | 2.6 |
| 000924 | | | | | | | |
| SRS- | 1433 | usasugauCfaAfaGfcgccacugca | usGfscaguGfgcgcUfuUfgAfucauascsa | 87.7 | 6.2 | 96.3 | 7.0 |
| 000925 | | | | | | | |
| SRS- | 1435 | usgsaucaAfaGfcGfccacugccca | usGfsggcaGfuggcGfcUfuUfgaucasusa | 80.4 | 6.7 | 86.8 | 5.0 |
| 000926 | | | | | | | |
| SRS- | 1436 | gsasucaaAfgCfgCfcacugcccua | usAfsgggcAfguggCfgCfuUfugaucsasu | 92.3 | 4.4 | 88.7 | 2.8 |
| 000927 | | | | | | | |
| SRS- | 1437 | asuscaaaGfcGfcCfacugcccuga | usCfsagggCfagugGfcGfcUfuugauscsa | 103.6 | 4.4 | 97.0 | 3.6 |
| 000928 | | | | | | | |
| SRS- | 1466 | gsgsccgcGfuGfgCfcaacccgcua | usAfsgcggGfuuggCfcAfcGfcggccscsa | 97.6 | 2.7 | 95.8 | 10.7 |
| 000929 | | | | | | | |
| SRS- | 1479 | ascsccgcUfgAfgCfacagcaugaa | usUfscaugCfugugCfuCfaGfcgggususg | 92.2 | 3.8 | 97.4 | 10.9 |
| 000930 | | | | | | | |
| SRS- | 1544 | gscscuuuGfaGfgCfaaaggccaga | usCfsuggcCfuuugCfcUfcAfaaggcscsa | 88.8 | 6.3 | 97.0 | 10.0 |
| 000931 | | | | | | | |
| SRS- | 1545 | cscsuuugAfgGfcAfaaggccagca | usGfscuggCfcuuuGfcCfuCfaaaggscsc | 90.3 | 6.3 | 99.9 | 9.5 |
| 000932 | | | | | | | |
| SRS- | 1566 | gscsagauAfaCfaAfccccggacaa | usUfsguccGfggguUfgUfuAfucugcsusg | 91.1 | 8.3 | 101.7 | 15.7 |
| 000933 | | | | | | | |
| SRS- | 1616 | cscsuuuuCfuUfcUfaaugagucga | usCfsgacuCfauuaGfaAfgAfaaaggsusg | 21.0 | 0.7 | 37.5 | 5.1 |
| 000934 | | | | | | | |
| SRS- | 1617 | csusuuucUfuCfuAfaugagucgaa | usUfscgacUfcauuAfgAfaGfaaaagsgsu | 10.0 | 1.0 | 16.5 | 1.7 |
| 000935 | | | | | | | |
| SRS- | 1618 | ususuucuUfcUfaAfugagucgaca | usGfsucgaCfucauUfaGfaAfgaaaasgsg | 14.4 | 1.3 | 22.8 | 3.7 |
| 000936 | | | | | | | |
| SRS- | 1619 | ususucuuCfuAfaUfgagucgacua | usAfsgucgAfcucaUfuAfgAfagaaasasg | 20.6 | 1.9 | 27.9 | 5.3 |
| 000937 | | | | | | | |
| SRS- | 1620 | ususcuucUfaAfuGfagucgacuua | usAfsagucGfacucAfuUfaGfaagaasasa | 15.1 | 0.8 | 23.7 | 2.9 |
| 000938 | | | | | | | |
| SRS- | 1623 | ususcuaaUfgAfgUfcgacuuugaa | usUfscaaaGfucgaCfuCfaUfuagaasgsa | 23.9 | 1.4 | 32.6 | 2.7 |
| 000939 | | | | | | | |
| SRS- | 1639 | ususgagcUfgGfaAfagcagccgua | usAfscggcUfgcuuUfcCfaGfcucaasasg | 62.4 | 1.6 | 72.5 | 4.6 |
| 000940 | | | | | | | |
| SRS- | 1652 | csasgccgUfuUfcUfccuuggucua | usAfsgaccAfaggaGfaAfaCfggcugscsu | 18.8 | 1.3 | 25.2 | 3.3 |
| 000941 | | | | | | | |
| SRS- | 1655 | cscsguuuCfuCfcUfuggucuaaga | usCfsuuagAfccaaGfgAfgAfaacggscsu | 50.0 | 2.7 | 62.3 | 6.0 |
| 000942 | | | | | | | |
| SRS- | 1656 | csgsuuucUfcCfuUfggucuaagua | usAfscuuaGfaccaAfgGfaGfaaacgsgsc | 80.6 | 7.6 | 92.6 | 10.9 |
| 000943 | | | | | | | |
| SRS- | 1766 | gscsaagaAfcCfaGfuguuuagcga | usCfsgcuaAfacacUfgGfuUfcuugcscsu | 66.5 | 5.1 | 87.9 | 7.7 |
| 000944 | | | | | | | |
| SRS- | 1767 | csasagaaCfcAfgUfguuuagcgca | usGfscgcuAfaacaCfuGfgUfucuugscsc | 72.0 | 9.4 | 82.3 | 7.8 |
| 000945 | | | | | | | |
| SRS- | 1768 | asasgaacCfaGfuGfuuuagcgcga | usCfsgcgcUfaaacAfcUfgGfuucuusgsc | 58.4 | 6.0 | 66.2 | 7.9 |
| 000946 | | | | | | | |
| SRS- | 1771 | asasccagUfgUfuUfagcgcgggaa | usUfscccgCfgcuaAfaCfaCfugguuscsu | 92.5 | 2.5 | 91.4 | 12.0 |
| 000947 | | | | | | | |
| SRS- | 1773 | cscsagugUfuUfaGfcgcgggacua | usAfsguccCfgcgcUfaAfaCfacuggsusu | 95.3 | 8.0 | 92.5 | 7.0 |
| 000948 | | | | | | | |
| SRS- | 1775 | asgsuguuUfaGfcGfcgggacuaca | usGfsuaguCfccgcGfcUfaAfacacusgsg | 48.3 | 3.7 | 65.8 | 6.4 |
| 000949 | | | | | | | |
| SRS- | 1780 | ususagcgCfgGfgAfcuacuguuca | usGfsaacaGfuaguCfcCfgCfgcuaasasc | 53.3 | 3.6 | 75.4 | 0.5 |
| 000950 | | | | | | | |
| SRS- | 1781 | usasgcgcGfgGfaCfuacuguucca | usGfsgaacAfguagUfcCfcGfcgcuasasa | 69.0 | 6.9 | 90.4 | 6.2 |
| 000951 | | | | | | | |
| SRS- | 1783 | gscsgcggGfaCfuAfcuguuccaaa | usUfsuggaAfcaguAfgUfcCfcgcgcsusa | 33.2 | 11.3 | 43.1 | 3.0 |
| 000952 | | | | | | | |
| SRS- | 1800 | csasaaaaGfaAfuUfccaaccgaca | usGfsucggUfuggaAfuUfcUfuuuugsgsa | 26.2 | 3.0 | 35.3 | 1.3 |
| 000953 | | | | | | | |
| SRS- | 1801 | asasaaagAfaUfuCfcaaccgacca | usGfsgucgGfuuggAfaUfuCfuuuuusgsg | 72.7 | 3.5 | 82.2 | 6.9 |
| 000954 | | | | | | | |
| SRS- | 1805 | asgsaauuCfcAfaCfcgaccagcua | usAfsgcugGfucggUfuGfgAfauucususu | 92.7 | 8.0 | 97.8 | 7.0 |
| 000955 | | | | | | | |
| SRS- | 1806 | gsasauucCfaAfcCfgaccagcuua | usAfsagcuGfgucgGfuUfgGfaauucsusu | 39.0 | 13.7 | 58.3 | 5.0 |
| 000956 | | | | | | | |
| SRS- | 1807 | asasuuccAfaCfcGfaccagcuuga | usCfsaagcUfggucGfgUfuGfgaauuscsu | 68.9 | 5.5 | 79.5 | 5.0 |
| 000957 | | | | | | | |
| SRS- | 1808 | asusuccaAfcCfgAfccagcuugua | usAfscaagCfugguCfgGfuUfggaaususc | 87.3 | 7.2 | 87.2 | 3.0 |
| 000958 | | | | | | | |
| SRS- | 1809 | ususccaaCfcGfaCfcagcuuguua | usAfsacaaGfcuggUfcGfgUfuggaasusu | 89.5 | 6.9 | 95.2 | 8.1 |
| 000959 | | | | | | | |
| SRS- | 1810 | uscscaacCfgAfcCfagcuuguuua | usAfsaacaAfgcugGfuCfgGfuuggasasu | 25.9 | 2.5 | 37.9 | 1.7 |
| 000960 | | | | | | | |
| SRS- | 1905 | ususgccuUfcGfgUfuuguauuuaa | usUfsaaauAfcaaaCfcGfaAfggcaasusg | 70.1 | 2.5 | 76.7 | 3.7 |
| 000961 | | | | | | | |
| SRS- | 1911 | uscsgguuUfgUfaUfuuagugucua | usAfsgacaCfuaaaUfaCfaAfaccgasasg | 65.1 | 5.8 | 72.6 | 3.0 |
| 000962 | | | | | | | |
| SRS- | 1934 | asusguaaGfaAfcAfugaccuccga | usCfsggagGfucauGfuUfcUfuacaususc | 70.8 | 1.6 | 68.1 | 14.3 |
| 000963 | | | | | | | |
| SRS- | 1940 | gsasacauGfaCfcUfccguguagua | usAfscuacAfcggaGfgUfcAfuguucsusu | 81.7 | 2.4 | 89.8 | 2.0 |
| 000964 | | | | | | | |
| SRS- | 1947 | ascscuccGfuGfuAfgugucuguaa | usUfsacagAfcacuAfcAfcGfgagguscsa | 67.2 | 6.5 | 76.1 | 2.2 |
| 000965 | | | | | | | |
| SRS- | 1955 | gsusagugUfcUfgUfaauaccuuaa | usUfsaaggUfauuaCfaGfaCfacuacsasc | 68.6 | 4.9 | 77.2 | 2.7 |
| 000966 | | | | | | | |
| SRS- | 2000 | ususugaaCfaAfuAfcgugaaagaa | usUfscuuuCfacguAfuUfgUfucaaasasa | 78.1 | 3.8 | 90.3 | 5.2 |
| 000967 | | | | | | | |
| SRS- | 2001 | ususgaacAfaUfaCfgugaaagaua | usAfsucuuUfcacgUfaUfuGfuucaasasa | 79.9 | 6.2 | 97.1 | 6.6 |
| 000968 | | | | | | | |
| SRS- | 2002 | usgsaacaAfuAfcGfugaaagauga | usCfsaucuUfucacGfuAfuUfguucasasa | 88.0 | 5.7 | 94.0 | 4.4 |
| 000969 | | | | | | | |
| SRS- | 2003 | gsasacaaUfaCfgUfgaaagaugca | usGfscaucUfuucaCfgUfaUfuguucsasa | 91.0 | 9.7 | 100.2 | 4.4 |
| 000970 | | | | | | | |
| SRS- | 2005 | ascsaauaCfgUfgAfaagaugcaaa | usUfsugcaUfcuuuCfaCfgUfauugususc | 88.8 | 10.8 | 98.0 | 3.2 |
| 000971 | | | | | | | |
| SRS- | 2014 | gsasaagaUfgCfaAfgcaccugaaa | usUfsucagGfugcuUfgCfaUfcuuucsasc | 84.8 | 4.8 | 97.1 | 4.4 |
| 000972 | | | | | | | |
| SRS- | 2030 | usgsaauuUfcUfgUfuugaaugcga | usCfsgcauUfcaaaCfaGfaAfauucasgsg | 79.5 | 9.7 | 94.5 | 3.4 |
| 000973 | | | | | | | |
| SRS- | 2074 | ususguguUfaGfuAfauaaacguca | usGfsacguUfuauuAfcUfaAfcacaasgsg | 73.6 | 2.5 | 84.0 | 4.1 |
| 000974 | | | | | | | |
| SRS- | 2076 | gsusguuaGfuAfaUfaaacgucuua | usAfsagacGfuuuaUfuAfcUfaacacsasa | 82.2 | 4.6 | 89.1 | 3.2 |
| 000975 | | | | | | | |
| SRS- | 2083 | usasauaaAfcGfuCfuugccacaaa | usUfsugugGfcaagAfcGfuUfuauuascsu | 79.4 | 4.6 | 81.2 | 3.3 |
| 000976 | | | | | | | |
| SRS- | 2084 | asasuaaaCfgUfcUfugccacaaua | usAfsuuguGfgcaaGfaCfgUfuuauusasc | 81.9 | 4.6 | 81.6 | 1.4 |
| 000977 | | | | | | | |
| SRS- | 2087 | asasacguCfuUfgCfcacaauaaga | usCfsuuauUfguggCfaAfgAfcguuusasu | 105.3 | 4.9 | 94.5 | 1.9 |
| 000978 | | | | | | | |
| SRS- | 2088 | asascgucUfuGfcCfacaauaagca | usGfscuuaUfugugGfcAfaGfacguususa | 95.7 | 9.9 | 96.7 | 9.2 |
| 000979 | | | | | | | |
| SRS- | 2089 | ascsgucuUfgCfcAfcaauaagcca | usGfsgcuuAfuuguGfgCfaAfgacgususu | 96.8 | 10.3 | 105.3 | 5.6 |
| 000980 | | | | | | | |

Note:
the target position is relative to human transcript NM_001384479.1; “A” refers to adenosine-3′-phosphate; “a” refers to 2′-O-methyladenosine-3′-phosphate; “Af”′ refers to 2′-fluoroadenosine-3′-phosphate; “dA” refers to 2′-deoxyadenosine-3-phosphate; “C” refers to cytidine-3′-phosphate; “c” refers to 2′-O-methylcytidine-3′-phosphate; “Cf” refers to 2′-fluorocytidine-3′-phosphate; “dC” refers to 2′-deoxycytidine-3′-phosphate; “G” refers to guanosine-3′-phosphate; “g” refers to 2′-O-methylguanosine-3′-phosphate; “Gf” refers to 2′-fluoroguanosine-3′-phosphate; “dG” refers to 2′-deoxyguanosine-3′-phosphate; “U” refers to uridine-3′-phosphate; “u” refers to 2′-O-methyluridine-3′-phosphate; “Uf” refers to 2′-fluorouridine-3′-phosphate; “T” refers to 5-methyluridine-3′-phosphate; “t” refers to 2′-O-methyl-5-methyluridine-3′-phosphate; “Tf”′ refers to 2′-fluoro-5-methyluridine-3′-phosphate; “dT” refers to 2′-deoxythymidine-3′-phosphate; “s” refers to 3′-phosphorothioate. Note that, in some instances, the passenger strand sequence is coupled to a targeting moiety (e.g., GalNAc or galactose (e.g., L96)) at the 3′ end of the passenger strand.

TABLE 3
Sequences Used in In Vitro Dose Response Curve

| | Target | SEQ | | SEQ | | SEQ | | SEQ | Passenger Strand |
|---|---|---|---|---|---|---|---|---|---|
| Duplex | Posi- | ID | | ID | Guide Strand Base | ID | Passenger Strand | ID | Base |
| ID | tion | NO. | Guide Strand Sequence (5′-3′) | NO. | Sequence (5′-3′) | NO. | Sequence (5′-3′) | NO. | Sequence (5′-3′) |
| SRS- | 166 | 833 | usUfscucaUfugugGfaUfgAfcgaggsusg | 769 | UUCUCAUUGUGGAUGACGAGGUG | 961 | cscsucguCfaUfcCfacaaugagaa | 897 | CCUCGUCAUCCACAAUG |
| 001365 | | | | | | | | | AGAA |
| SRS- | 167 | 834 | usCfsucucAfuuguGfgAfuGfacgagsgsu | 770 | UCUCUCAUUGUGGAUGACGAGGU | 962 | csuscgucAfuCfcAfcaaugagaga | 898 | CUCGUCAUCCACAAUGA |
| 000801 | | | | | | | | | GAGA |
| SRS- | 169 | 835 | usUfsacucUfcauuGfuGfgAfugacgsasg | 771 | UUACUCUCAUUGUGGAUGACGAG | 963 | csgsucauCfcAfcAfaugagaguaa | 899 | CGUCAUCCACAAUGAGA |
| 001366 | | | | | | | | | GUAA |
| SRS- | 170 | 836 | usGfsuacuCfucauUfgUfgGfaugacsgsa | 772 | UGUACUCUCAUUGUGGAUGACGA | 964 | gsuscaucCfaCfaAfugagaguaca | 900 | GUCAUCCACAAUGAGAG |
| 000802 | | | | | | | | | UACA |
| SRS- | 172 | 837 | usAfsgguaCfucucAfuUfgUfggaugsasc | 773 | UAGGUACUCUCAUUGUGGAUGAC | 965 | csasuccaCfaAfuGfagaguaccua | 901 | CAUCCACAAUGAGAGUA |
| 000804 | | | | | | | | | CCUA |
| SRS- | 173 | 838 | usCfsagguAfcucuCfaUfuGfuggausgsa | 774 | UCAGGUACUCUCAUUGUGGAUGA | 966 | asusccacAfaUfgAfgaguaccuga | 902 | AUCCACAAUGAGAGUAC |
| 000805 | | | | | | | | | CUGA |
| SRS- | 175 | 839 | usCfsacagGfuacuCfuCfaUfuguggsasu | 775 | UCACAGGUACUCUCAUUGUGGAU | 967 | cscsacaaUfgAfgAfguaccuguga | 903 | CCACAAUGAGAGUACCU |
| 000806 | | | | | | | | | GUGA |
| SRS- | 176 | 840 | usUfscacaGfguacUfcUfcAfuugugsgsa | 776 | UUCACAGGUACUCUCAUUGUGGA | 968 | csascaauGfaGfaGfuaccugugaa | 904 | CACAAUGAGAGUACCUG |
| 001367 | | | | | | | | | UGAA |
| SRS- | 179 | 841 | usUfsgcucAfcaggUfaCfuCfucauusgsu | 777 | UUGCUCACAGGUACUCUCAUUGU | 969 | asasugagAfgUfaCfcugugagcaa | 905 | AAUGAGAGUACCUGUGA |
| 001368 | | | | | | | | | GCAA |
| SRS- | 325 | 842 | usUfscaacUfugucUfuCfgGfugucasasg | 778 | UUCAACUUGUCUUCGGUGUCAAG | 970 | usgsacacCfgAfaGfacaaguugaa | 906 | UGACACCGAAGACAAGU |
| 000819 | | | | | | | | | UGAA |
| SRS- | 370 | 843 | usUfsacggAfagccCfaAfgAfaguugsgsc | 779 | UUACGGAAGCCCAAGAAGUUGGC | 971 | csasacuuCfuUfgGfgcuuccguaa | 907 | CAACUUCUUGGGCUUCC |
| 000828 | | | | | | | | | GUAA |
| SRS- | 371 | 844 | usAfsuacgGfaagcCfcAfaGfaaguusgsg | 780 | UAUACGGAAGCCCAAGAAGUUGG | 972 | asascuucUfuGfgGfcuuccguaua | 908 | AACUUCUUGGGCUUCCG |
| 000829 | | | | | | | | | UAUA |
| SRS- | 373 | 845 | usAfsuauaCfggaaGfcCfcAfagaagsusu | 781 | UAUAUACGGAAGCCCAAGAAGUU | 973 | csusucuuGfgGfcUfuccguauaua | 909 | CUUCUUGGGCUUCCGUA |
| 000830 | | | | | | | | | UAUA |
| SRS- | 374 | 846 | usUfsauauAfcggaAfgCfcCfaagaasgsu | 782 | UUAUAUACGGAAGCCCAAGAAGU | 974 | ususcuugGfgCfuUfccguauauaa | 910 | UUCUUGGGCUUCCGUAU |
| 000831 | | | | | | | | | AUAA |
| SRS- | 375 | 847 | usAfsuauaUfacggAfaGfcCfcaagasasg | 783 | UAUAUAUACGGAAGCCCAAGAAG | 975 | uscsuuggGfcUfuCfcguauauaua | 911 | UCUUGGGCUUCCGUAUA |
| 000832 | | | | | | | | | UAUA |
| SRS- | 376 | 848 | usCfsauauAfuacgGfaAfgCfccaagsasa | 784 | UCAUAUAUACGGAAGCCCAAGAA | 976 | csusugggCfuUfcCfguauauauga | 912 | CUUGGGCUUCCGUAUAU |
| 000833 | | | | | | | | | AUGA |
| SRS- | 377 | 849 | usCfscauaUfauacGfgAfaGfcccaasgsa | 785 | UCCAUAUAUACGGAAGCCCAAGA | 977 | ususgggcUfuCfcGfuauauaugga | 913 | UUGGGCUUCCGUAUAUA |
| 000834 | | | | | | | | | UGGA |
| SRS- | 380 | 850 | usAfsugccAfuauaUfaCfgGfaagccscsa | 786 | UAUGCCAUAUAUACGGAAGCCCA | 978 | gsgscuucCfgUfaUfauauggcaua | 914 | GGCUUCCGUAUAUAUGG |
| 000836 | | | | | | | | | CAUA |
| SRS- | 383 | 851 | usUfsgcauGfccauAfuAfuAfcggaasgsc | 787 | UUGCAUGCCAUAUAUACGGAAGC | 979 | ususccguAfuAfuAfuggcaugcaa | 915 | UUCCGUAUAUAUGGCAU |
| 000838 | | | | | | | | | GCAA |
| SRS- | 387 | 852 | usAfscuguGfcaugCfcAfuAfuauacsgsg | 788 | UACUGUGCAUGCCAUAUAUACGG | 980 | gsusauauAfuGfgCfaugcacagua | 916 | GUAUAUAUGGCAUGCAC |
| 000840 | | | | | | | | | AGUA |
| SRS- | 394 | 853 | usAfsuagcUfcacuGfuGfcAfugccasusa | 789 | UAUAGCUCACUGUGCAUGCCAUA | 981 | usgsgcauGfcAfcAfgugagcuaua | 917 | UGGCAUGCACAGUGAGC |
| 000843 | | | | | | | | | UAUA |
| SRS- | 535 | 854 | usUfsgcagUfucuuGfuCfcUfuccaasgsg | 790 | UUGCAGUUCUUGUCCUUCCAAGG | 982 | ususggaaGfgAfcAfagaacugcaa | 918 | UUGGAAGGACAAGAACU |
| 001369 | | | | | | | | | GCAA |
| SRS- | 782 | 855 | usAfsaccuGfucaaUfcUfuCfucagcsasg | 791 | UAACCUGUCAAUCUUCUCAGCAG | 983 | gscsugagAfaGfaUfugacagguua | 919 | GCUGAGAAGAUUGACAG |
| 001370 | | | | | | | | | GUUA |
| SRS- | 783 | 856 | usGfsaaccUfgucaAfuCfuUfcucagscsa | 792 | UGAACCUGUCAAUCUUCUCAGCA | 984 | csusgagaAfgAfuUfgacagguuca | 920 | CUGAGAAGAUUGACAGG |
| 001371 | | | | | | | | | UUCA |
| SRS- | 784 | 857 | usUfsgaacCfugucAfaUfcUfucucasgsc | 793 | UUGAACCUGUCAAUCUUCUCAGC | 985 | usgsagaaGfaUfuGfacagguucaa | 921 | UGAGAAGAUUGACAGGU |
| 000876 | | | | | | | | | UCAA |
| SRS- | 785 | 858 | usAfsugaaCfcuguCfaAfuCfuucucsasg | 794 | UAUGAACCUGUCAAUCUUCUCAG | 986 | gsasgaagAfuUfgAfcagguucaua | 922 | GAGAAGAUUGACAGGUU |
| 001372 | | | | | | | | | CAUA |
| SRS- | 1114 | 859 | usAfsguuuUfgcugGfaAfaGfugagascsc | 795 | UAGUUUUGCUGGAAAGUGAGACC | 987 | uscsucacUfuUfcCfagcaaaacua | 923 | UCUCACUUUCCAGCAAA |
| 001373 | | | | | | | | | ACUA |
| SRS- | 1115 | 860 | usGfsaguuUfugcuGfgAfaAfgugagsasc | 796 | UGAGUUUUGCUGGAAAGUGAGAC | 988 | csuscacuUfuCfcAfgcaaaacuca | 924 | CUCACUUUCCAGCAAAA |
| 001374 | | | | | | | | | CUCA |
| SRS- | 1118 | 861 | usAfsgggaGfuuuuGfcUfgGfaaagusgsa | 797 | UAGGGAGUUUUGCUGGAAAGUGA | 989 | ascsuuucCfaGfcAfaaacucccua | 925 | ACUUUCCAGCAAAACUC |
| 001375 | | | | | | | | | CCUA |
| SRS- | 1121 | 862 | usUfsugagGfgaguUfuUfgCfuggaasasg | 798 | UUUGAGGGAGUUUUGCUGGAAAG | 990 | ususccagCfaAfaAfcucccucaaa | 926 | UUCCAGCAAAACUCCCU |
| 001376 | | | | | | | | | CAAA |
| SRS- | 1122 | 863 | usGfsuugaGfggagUfuUfuGfcuggasasa | 799 | UGUUGAGGGAGUUUUGCUGGAAA | 991 | uscscagcAfaAfaCfucccucaaca | 927 | UCCAGCAAAACUCCCUC |
| 001377 | | | | | | | | | AACA |
| SRS- | 1123 | 864 | usAfsguugAfgggaGfuUfuUfgcuggsasa | 800 | UAGUUGAGGGAGUUUUGCUGGAA | 992 | cscsagcaAfaAfcUfcccucaacua | 928 | CCAGCAAAACUCCCUCA |
| 000899 | | | | | | | | | ACUA |
| SRS- | 1130 | 865 | usUfsucauCfcaguUfgAfgGfgaguususu | 801 | UUUCAUCCAGUUGAGGGAGUUUU | 993 | asascuccCfuCfaAfcuggaugaaa | 929 | AACUCCCUCAACUGGAU |
| 001378 | | | | | | | | | GAAA |
| SRS- | 1132 | 866 | usUfscuucAfuccaGfuUfgAfgggagsusu | 802 | UUCUUCAUCCAGUUGAGGGAGUU | 994 | csuscccuCfaAfcUfggaugaagaa | 930 | CUCCCUCAACUGGAUGA |
| 001379 | | | | | | | | | AGAA |
| SRS- | 1135 | 867 | usGfsuuucUfucauCfcAfgUfugaggsgsa | 803 | UGUUUCUUCAUCCAGUUGAGGGA | 995 | cscsucaaCfuGfgAfugaagaaaca | 931 | CCUCAACUGGAUGAAGA |
| 001380 | | | | | | | | | AACA |
| SRS- | 1259 | 868 | usUfsuuugCfagguUfcAfgCfucggusgsu | 804 | UUUUUGCAGGUUCAGCUCGGUGU | 996 | ascscgagCfuGfaAfccugcaaaaa | 932 | ACCGAGCUGAACCUGCA |
| 001381 | | | | | | | | | AAAA |
| SRS- | 1261 | 869 | usAfsuuuuUfgcagGfuUfcAfgcucgsgsu | 805 | UAUUUUUGCAGGUUCAGCUCGGU | 997 | csgsagcuGfaAfcCfugcaaaaaua | 933 | CGAGCUGAACCUGCAAA |
| 000906 | | | | | | | | | AAUA |
| SRS- | 1263 | 870 | usCfsaauuUfuugcAfgGfuUfcagcuscsg | 806 | UCAAUUUUUGCAGGUUCAGCUCG | 998 | asgscugaAfcCfuGfcaaaaauuga | 934 | AGCUGAACCUGCAAAAA |
| 001382 | | | | | | | | | UUGA |
| SRS- | 1264 | 871 | usUfscaauUfuuugCfaGfgUfucagcsusc | 807 | UUCAAUUUUUGCAGGUUCAGCUC | 999 | gscsugaaCfcUfgCfaaaaauugaa | 935 | GCUGAACCUGCAAAAAU |
| 000907 | | | | | | | | | UGAA |
| SRS- | 1265 | 872 | usCfsucaaUfuuuuGfcAfgGfuucagscsu | 808 | UCUCAAUUUUUGCAGGUUCAGCU | 1000 | csusgaacCfuGfcAfaaaauugaga | 936 | CUGAACCUGCAAAAAUU |
| 001383 | | | | | | | | | GAGA |
| SRS- | 1269 | 873 | usAfsuugcUfcaauUfuUfuGfcaggususc | 809 | UAUUGCUCAAUUUUUGCAGGUUC | 1001 | ascscugcAfaAfaAfuugagcaaua | 937 | ACCUGCAAAAAUUGAGC |
| 001384 | | | | | | | | | AAUA |
| SRS- | 1353 | 874 | usUfsugggUfagacUfcUfgUfgggcuscsu | 810 | UUUGGGUAGACUCUGUGGGCUCU | 1002 | asgscccaCfaGfaGfucuacccaaa | 938 | AGCCCACAGAGUCUACC |
| 000910 | | | | | | | | | CAAA |
| SRS- | 1415 | 875 | usUfsacacAfgcaaAfcAfgGfaauggsgsc | 811 | UUACACAGCAAACAGGAAUGGGC | 1003 | cscsauucCfuGfuUfugcuguguaa | 939 | CCAUUCCUGUUUGCUGU |
| 001385 | | | | | | | | | GUAA |
| SRS- | 1417 | 876 | usCfsauacAfcagcAfaAfcAfggaausgsg | 812 | UCAUACACAGCAAACAGGAAUGG | 1004 | asusuccuGfuUfuGfcuguguauga | 940 | AUUCCUGUUUGCUGUGU |
| 001386 | | | | | | | | | AUGA |
| SRS- | 1420 | 877 | usGfsaucaUfacacAfgCfaAfacaggsasa | 813 | UGAUCAUACACAGCAAACAGGAA | 1005 | cscsuguuUfgCfuGfuguaugauca | 941 | CCUGUUUGCUGUGUAUG |
| 000920 | | | | | | | | | AUCA |
| SRS- | 1422 | 878 | usUfsugauCfauacAfcAfgCfaaacasgsg | 814 | UUUGAUCAUACACAGCAAACAGG | 1006 | usgsuuugCfuGfuGfuaugaucaaa | 942 | UGUUUGCUGUGUAUGAU |
| 001387 | | | | | | | | | CAAA |
| SRS- | 1424 | 879 | usCfsuuugAfucauAfcAfcAfgcaaascsa | 815 | UCUUUGAUCAUACACAGCAAACA | 1007 | ususugcuGfuGfuAfugaucaaaga | 943 | UUUGCUGUGUAUGAUCA |
| 001388 | | | | | | | | | AAGA |
| SRS- | 1608 | 880 | usUfsagaaGfaaaaGfgUfgGfgagacsusg | 816 | UUAGAAGAAAAGGUGGGAGACUG | 1008 | gsuscuccCfaCfcUfuuucuucuaa | 944 | GUCUCCCACCUUUUCUU |
| 001389 | | | | | | | | | CUAA |
| SRS- | 1609 | 881 | usUfsuagaAfgaaaAfgGfuGfggagascsu | 817 | UUUAGAAGAAAAGGUGGGAGACU | 1009 | uscsucccAfcCfuUfuucuucuaaa | 945 | UCUCCCACCUUUUCUUC |
| 001390 | | | | | | | | | UAAA |
| SRS- | 1612 | 882 | usUfscauuAfgaagAfaAfaGfgugggsasg | 818 | UUCAUUAGAAGAAAAGGUGGGAG | 1010 | cscscaccUfuUfuCfuucuaaugaa | 946 | CCCACCUUUUCUUCUAA |
| 001391 | | | | | | | | | UGAA |
| SRS- | 1614 | 883 | usAfscucaUfuagaAfgAfaAfaggugsgsg | 819 | UACUCAUUAGAAGAAAAGGUGGG | 1011 | csasccuuUfuCfuUfcuaaugagua | 947 | CACCUUUUCUUCUAAUG |
| 001392 | | | | | | | | | AGUA |
| SRS- | 1652 | 884 | usAfsgaccAfaggaGfaAfaCfggcugscsu | 820 | UAGACCAAGGAGAAACGGCUGCU | 1012 | csasgccgUfuUfcUfccuuggucua | 948 | CAGCCGUUUCUCCUUGG |
| 000941 | | | | | | | | | UCUA |
| SRS- | 1762 | 885 | usAfsaacaCfugguUfcUfuGfccuccscsc | 821 | UAAACACUGGUUCUUGCCUCCCC | 1013 | gsgsaggcAfaGfaAfccaguguuua | 949 | GGAGGCAAGAACCAGUG |
| 001393 | | | | | | | | | UUUA |
| SRS- | 1763 | 886 | usUfsaaacAfcuggUfuCfuUfgccucscsc | 822 | UUAAACACUGGUUCUUGCCUCCC | 1014 | gsasggcaAfgAfaCfcaguguuuaa | 950 | GAGGCAAGAACCAGUGU |
| 001394 | | | | | | | | | UUAA |
| SRS- | 1764 | 887 | usCfsuaaaCfacugGfuUfcUfugccuscsc | 823 | UCUAAACACUGGUUCUUGCCUCC | 1015 | asgsgcaaGfaAfcCfaguguuuaga | 951 | AGGCAAGAACCAGUGUU |
| 001395 | | | | | | | | | UAGA |
| SRS- | 1765 | 888 | usGfscuaaAfcacuGfgUfuCfuugccsusc | 824 | UGCUAAACACUGGUUCUUGCCUC | 1016 | gsgscaagAfaCfcAfguguuuagca | 952 | GGCAAGAACCAGUGUUU |
| 001396 | | | | | | | | | AGCA |
| SRS- | 1796 | 889 | usGfsuuggAfauucUfuUfuUfggaacsasg | 825 | UGUUGGAAUUCUUUUUGGAACAG | 1017 | gsusuccaAfaAfaGfaauuccaaca | 953 | GUUCCAAAAAGAAUUCC |
| 001397 | | | | | | | | | AACA |
| SRS- | 1800 | 890 | usGfsucggUfuggaAfuUfcUfuuuugsgsa | 826 | UGUCGGUUGGAAUUCUUUUUGGA | 1018 | csasaaaaGfaAfuUfccaaccgaca | 954 | CAAAAAGAAUUCCAACC |
| 000953 | | | | | | | | | GACA |
| SRS- | 1806 | 891 | usAfsagcuGfgucgGfuUfgGfaauucsusu | 827 | UAAGCUGGUCGGUUGGAAUUCUU | 1019 | gsasauucCfaAfcCfgaccagcuua | 955 | GAAUUCCAACCGACCAG |
| 000956 | | | | | | | | | CUUA |
| SRS- | 1810 | 892 | usAfsaacaAfgcugGfuCfgGfuuggasasu | 828 | UAAACAAGCUGGUCGGUUGGAAU | 1020 | uscscaacCfgAfcCfagcuuguuua | 956 | UCCAACCGACCAGCUUG |
| 000960 | | | | | | | | | UUUA |
| SRS- | 1815 | 893 | usUfsucacAfaacaAfgCfuGfgucggsusu | 829 | UUUCACAAACAAGCUGGUCGGUU | 1021 | cscsgaccAfgCfuUfguuugugaaa | 957 | CCGACCAGCUUGUUUGU |
| 001398 | | | | | | | | | GAAA |
| SRS- | 1816 | 894 | usUfsuucaCfaaacAfaGfcUfggucgsgsu | 830 | UUUUCACAAACAAGCUGGUCGGU | 1022 | csgsaccaGfcUfuGfuuugugaaaa | 958 | CGACCAGCUUGUUUGUG |
| 001399 | | | | | | | | | AAAA |
| SRS- | 1817 | 895 | usGfsuuucAfcaaaCfaAfgCfuggucsgsg | 831 | UGUUUCACAAACAAGCUGGUCGG | 1023 | gsasccagCfuUfgUfuugugaaaca | 959 | GACCAGCUUGUUUGUGA |
| 001400 | | | | | | | | | AACA |
| SRS- | 1818 | 896 | usUfsguuuCfacaaAfcAfaGfcugguscsg | 832 | UUGUUUCACAAACAAGCUGGUCG | 1024 | ascscagcUfuGfuUfugugaaacaa | 960 | ACCAGCUUGUUUGUGAA |
| 001401 | | | | | | | | | ACAA |

Note:
the target position is relative to human transcript NM_ 001384479.1; the corresponding sequence of a certain SEQ ID NO. is located on its right column of the same row. “A” refers to adenosine-3′-phosphate; “a” refers to 2′-O-methyladenosine-3′-phosphate; “Af” refers to 2′-fluoroadenosine-3′-phosphate; “dA” refers to 2′-deoxyadenosine-3-phosphate; “C” refers to cytidine-3′-phosphate; “c” refers to 2′-O-methylcytidine-3′-phosphate; “Cf” refers to 2′-fluorocytidine-3′-phosphate; “dC” refers to 2′-deoxycytidine-3′-phosphate; “G” refers to guanosine-3′-phosphate; “g” refers to 2′-O-methylguanosine-3′-phosphate; “Gf″ refers to 2′-fluoroguanosine-3′-phosphate; “dG” refers to 2′-deoxyguanosine-3′-phosphate; “U” refers to uridine-3′-phosphate; “u” refers to 2′-O-methyluridine-3′-phosphate; “Uf” refers to 2′-fluorouridine-3′-phosphate; “T” refers to 5-methyluridine-3′-phosphate; “t” refers to 2′-O-methyl-5-methyluridine-3′-phosphate; “Tf” refers to 2′-fluoro-5-methyluridine-3′-phosphate; “dT” refers to 2′-deoxythymidine-3′-phosphate; “s” refers to 3′-phosphorothioate. Note that, in some instances, the passenger strand sequence is coupled to a targeting moiety (e.g., GalNAc or galactose (e.g., L96)) at the 3′ end of the passenger strand.

TABLE 4
Summary of Drug Response Curves for Selected AGT siRNAs

| Sequence Information | | | | DRC Data | | | |
|---|---|---|---|---|---|---|---|
| | Target | | | IC50 @ | IC80 @ | MV max | SD max |
| Duplex ID | Position | Passenger Sequence | Guide Sequence | [μM] | [μM] | KD | KD |
| SRS-001365 | 166 | cscsucguCfaUfcCfacaaugagaa | usUfscucaUfugugGfaUfgAfcgaggsusg | 0.015 | #N/A | 74.7 | 2.2 |
| SRS-000801 | 167 | csuscgucAfuCfcAfcaaugagaga | usCfsucucAfuuguGfgAfuGfacgagsgsu | #N/A | #N/A | 43.6 | 1.7 |
| SRS-001366 | 169 | csgsucauCfcAfcAfaugagaguaa | usUfsacuc UfcauuGfuGfgAfugacgsasg | 0.027 | #N/A | 71.4 | 1.8 |
| SRS-000802 | 170 | gsuscaucCfaCfaAfugagaguaca | usGfsuacuCfucauUfgUfgGfaugacsgsa | 0.004 | 0.415 | 86.2 | 1.0 |
| SRS-000804 | 172 | csasuccaCfaAfuGfagaguaccua | usAfsgguaCfucucAfuUfgUfggaugsasc | 0.124 | #N/A | 73.6 | 1.8 |
| SRS-000805 | 173 | asusccacAfaUfgAfgaguaccuga | usCfsagguAfcucuCfaUfuGfuggausgsa | 0.658 | #N/A | 64.1 | 2.5 |
| SRS-000806 | 175 | cscsacaaUfgAfgAfguaccuguga | usCfsacagGfuacuCfuCfaUfuguggsasu | #N/A | #N/A | 39.0 | 3.2 |
| SRS-001367 | 176 | csascaauGfaGfaGfuaccugugaa | usUfscacaGfguacUfcUfcAfuugugsgsa | #N/A | #N/A | 36.5 | 2.7 |
| SRS-001368 | 179 | asasugagAfgUfaCfcugugagcaa | usUfsgcucAfcaggUfaCfuCfucauusgsu | #N/A | #N/A | 48.8 | 4.8 |
| SRS-000819 | 325 | usgsacacCfgAfaGfacaaguugaa | usUfscaacUfugucUfuCfgGfugucasasg | 0.103 | #N/A | 78.1 | 2.5 |
| SRS-000828 | 370 | csasacuuCfuUfgGfgcuuccguaa | usUfsacggAfagccCfaAfgAfaguugsgsc | #N/A | #N/A | 48.3 | 1.5 |
| SRS-000829 | 371 | asascuucUfuGfgGfcuuccguaua | usAfsuacgGfaagcCfcAfaGfaaguusgsg | 0.174 | #N/A | 70.7 | 2.4 |
| SRS-000830 | 373 | csusucuuGfgGfcUfuccguauaua | usAfsuauaCfggaaGfcCfcAfagaagsusu | 0.063 | #N/A | 78.5 | 0.4 |
| SRS-000831 | 374 | ususcuugGfgCfuUfccguauauaa | usUfsauauAfcggaAfgCfcCfaagaasgsu | 0.198 | #N/A | 69.0 | 3.8 |
| SRS-000832 | 375 | uscsuuggGfcUfuCfcguauauaua | usAfsuauaUfacggAfaGfcCfcaagasasg | #N/A | #N/A | 50.3 | 1.2 |
| SRS-000833 | 376 | csusugggCfuUfcCfguauauauga | usCfsauauAfuacgGfaAfgCfccaagsasa | #N/A | #N/A | 39.8 | 1.3 |
| SRS-000834 | 377 | ususgggcUfuCfcGfuauauaugga | usCfscauaUfauacGfgAfaGfcccaasgsa | #N/A | #N/A | 25.3 | 1.0 |
| SRS-000836 | 380 | gsgscuucCfgUfaUfauauggcaua | usAfsugccAfuauaUfaCfgGfaagccscsa | 0.019 | 1.475 | 85.3 | 0.9 |
| SRS-000838 | 383 | ususccguAfuAfuAfuggcaugcaa | usUfsgcauGfccauAfuAfuAfcggaasgsc | 7.233 | #N/A | 52.1 | 4.9 |
| SRS-000840 | 387 | gsusauauAfuGfgCfaugcacagua | usAfscuguGfcaugCfcAfuAfuauacsgsg | #N/A | #N/A | 11.9 | 2.9 |
| SRS-000843 | 394 | usgsgcauGfcAfcAfgugagcuaua | usAfsuagcUfcacuGfuGfcAfugccasusa | 0.170 | #N/A | 73.4 | 0.4 |
| SRS-001369 | 535 | ususggaaGfgAfcAfagaacugcaa | usUfsgcagUfucuuGfuCfcUfuccaasgsg | 0.353 | #N/A | 60.8 | 5.4 |
| SRS-001370 | 782 | gscsugagAfaGfaUfugacagguua | usAfsaccuGfucaaUfcUfuCfucagcsasg | #N/A | #N/A | 9.6 | 8.3 |
| SRS-001371 | 783 | csusgagaAfgAfuUfgacagguuca | usGfsaaccUfgucaAfuCfuUfcucagscsa | 0.811 | #N/A | 67.2 | 1.5 |
| SRS-000876 | 784 | usgsagaaGfaUfuGfacagguucaa | usUfsgaacCfugucAfaUfcUfucucasgsc | 0.008 | 0.344 | 90.1 | 0.8 |
| SRS-001372 | 785 | gsasgaagAfuUfgAfcagguucaua | usAfsugaaCfcuguCfaAfuCfuucucsasg | 0.006 | 0.668 | 86.6 | 2.4 |
| SRS-001373 | 1114 | uscsucacUfuUfcCfagcaaaacua | usAfsguuuUfgcugGfaAfaGfugagascsc | 0.249 | #N/A | 60.5 | 3.7 |
| SRS-001374 | 1115 | csuscacuUfuCfcAfgcaaaacuca | usGfsaguuUfugcuGfgAfaAfgugagsasc | #N/A | #N/A | 35.4 | 4.6 |
| SRS-001375 | 1118 | ascsuuucCfaGfcAfaaacucccua | usAfsgggaGfuuuuGfcUfgGfaaagusgsa | 0.014 | 1.060 | 86.3 | 0.9 |
| SRS-001376 | 1121 | ususccagCfaAfaAfcucccucaaa | usUfsugagGfgaguUfuUfgCfuggaasasg | 0.000 | 0.019 | 92.0 | 3.9 |
| SRS-001377 | 1122 | uscscagcAfaAfaCfucccucaaca | usGfsuugaGfggagUfuUfuGfcuggasasa | 0.334 | #N/A | 68.0 | 1.2 |
| SRS-000899 | 1123 | cscsagcaAfaAfcUfcccucaacua | usAfsguugAfgggaGfuUfuUfgcuggsasa | 0.458 | #N/A | 67.6 | 2.9 |
| SRS-001378 | 1130 | asascuccCfuCfaAfcuggaugaaa | usUfsucauCfcaguUfgAfgGfgaguususu | #N/A | #N/A | 27.5 | 6.0 |
| SRS-001379 | 1132 | csuscccuCfaAfcUfggaugaagaa | usUfscuucAfuccaGfuUfgAfgggagsusu | 6.647 | #N/A | 52.9 | 2.1 |
| SRS-001380 | 1135 | cscsucaaCfuGfgAfugaagaaaca | usGfsuuucUfucauCfcAfgUfugaggsgsa | 0.004 | 0.243 | 89.1 | 0.8 |
| SRS-001381 | 1259 | ascscgagCfuGfaAfccugcaaaaa | usUfsuuugCfagguUfcAfgCfucggusgsu | 0.028 | #N/A | 67.2 | 5.7 |
| SRS-000906 | 1261 | csgsagcuGfaAfcCfugcaaaaaua | usAfsuuuuUfgcagGfuUfcAfgcucgsgsu | 0.003 | 0.436 | 87.6 | 1.0 |
| SRS-001382 | 1263 | asgscugaAfcCfuGfcaaaaauuga | usCfsaauuUfuugcAfgGfuUfcagcuscsg | #N/A | #N/A | 27.6 | 5.2 |
| SRS-000907 | 1264 | gscsugaaCfcUfgCfaaaaauugaa | usUfscaauUfuuugCfaGfgUfucagcsusc | 1.264 | #N/A | 60.8 | 0.7 |
| SRS-001383 | 1265 | csusgaacCfuGfcAfaaaauugaga | usCfsucaaUfuuuuGfcAfgGfuucagscsu | #N/A | #N/A | 49.0 | 3.4 |
| SRS-001384 | 1269 | ascscugcAfaAfaAfuugagcaaua | usAfsuugcUfcaauUfuUfuGfcaggususc | 0.003 | 0.818 | 83.0 | 1.8 |
| SRS-000910 | 1353 | asgscccaCfaGfaGfucuacccaaa | usUfsugggUfagacUfcUfgUfgggcuscsu | 0.007 | 2.963 | 83.0 | 0.7 |
| SRS-001385 | 1415 | cscsauucCfuGfuUfugcuguguaa | usUfsacacAfgcaaAfcAfgGfaauggsgsc | 0.006 | 0.233 | 87.8 | 0.7 |
| SRS-001386 | 1417 | asusuccuGfuUfuGfcuguguauga | usCfsauacAfcagcAfaAfcAfggaausgsg | 1.028 | #N/A | 58.4 | 2.3 |
| SRS-000920 | 1420 | cscsuguuUfgCfuGfuguaugauca | usGfsaucaUfacacAfgCfaAfacaggsasa | 0.259 | #N/A | 74.8 | 3.4 |
| SRS-001387 | 1422 | usgsuuugCfuGfuGfuaugaucaaa | usUfsugauCfauacAfcAfgCfaaacasgsg | 0.001 | 0.054 | 90.8 | 0.8 |
| SRS-001388 | 1424 | ususugcuGfuGfuAfugaucaaaga | usCfsuuugAfucauAfcAfcAfgcaaascsa | 0.105 | #N/A | 74.9 | 1.2 |
| SRS-001389 | 1608 | gsuscuccCfaCfcUfuuucuucuaa | usUfsagaaGfaaaaGfgUfgGfgagacsusg | 0.012 | 4.810 | 80.2 | 2.7 |
| SRS-001390 | 1609 | uscsucccAfcCfuUfuucuucuaaa | usUfsuagaAfgaaaAfgGfuGfggagascsu | 0.013 | 3.929 | 80.7 | 1.4 |
| SRS-001391 | 1612 | cscscaccUfuUfuCfuucuaaugaa | usUfscauuAfgaagAfaAfaGfgugggsasg | 0.068 | #N/A | 77.1 | 2.0 |
| SRS-001392 | 1614 | csasccuuUfuCfuUfcuaaugagua | usAfscucaUfuagaAfgAfaAfaggugsgsg | 0.067 | #N/A | 68.3 | 2.6 |
| SRS-000941 | 1652 | csasgccgUfuUfcUfccuuggucua | usAfsgaccAfaggaGfaAfaCfggcugscsu | 0.021 | #N/A | 78.9 | 0.8 |
| SRS-001393 | 1762 | gsgsaggcAfaGfaAfccaguguuua | usAfsaacaCfugguUfcUfuGfccuccscsc | 0.034 | #N/A | 77.4 | 2.2 |
| SRS-001394 | 1763 | gsasggcaAfgAfaCfcaguguuuaa | usUfsaaacAfcuggUfuCfuUfgccucscsc | 0.451 | #N/A | 61.2 | 3.5 |
| SRS-001395 | 1764 | asgsgcaaGfaAfcCfaguguuuaga | usCfsuaaaCfacugGfuUfcUfugccuscsc | #N/A | #N/A | 41.3 | 1.8 |
| SRS-001396 | 1765 | gsgscaagAfaCfcAfguguuuagca | usGfscuaaAfcacuGfgUfuCfuugccsusc | #N/A | #N/A | 24.6 | 3.7 |
| SRS-001397 | 1796 | gsusuccaAfaAfaGfaauuccaaca | usGfsuuggAfauucUfuUfuUfggaacsasg | #N/A | #N/A | 47.3 | 1.6 |
| SRS-000953 | 1800 | csasaaaaGfaAfuUfccaaccgaca | usGfsucggUfuggaAfuUfcUfuuuugsgsa | 0.013 | 7.366 | 80.0 | 1.5 |
| SRS-000956 | 1806 | gsasauucCfaAfcCfgaccagcuua | usAfsagcuGfgucgGfuUfgGfaauucsusu | 2.494 | #N/A | 54.7 | 4.2 |
| SRS-000960 | 1810 | uscscaacCfgAfcCfagcuuguuua | usAfsaacaAfgcugGfuCfgGfuuggasasu | 0.411 | #N/A | 65.4 | 0.6 |
| SRS-001398 | 1815 | cscsgaccAfgCfuUfguuugugaaa | usUfsucacAfaacaAfgCfuGfgucggsusu | 0.613 | #N/A | 67.2 | 4.7 |
| SRS-001399 | 1816 | csgsaccaGfcUfuGfuuugugaaaa | usUfsuucaCfaaacAfaGfcUfggucgsgsu | 0.009 | 1.602 | 82.4 | 2.7 |
| SRS-001400 | 1817 | gsasccagCfuUfgUfuugugaaaca | usGfsuuucAfcaaaCfaAfgCfuggucsgsg | 0.014 | 2.448 | 82.4 | 1.0 |
| SRS-001401 | 1818 | ascscagcUfuGfuUfugugaaacaa | usUfsguuuCfacaaAfcAfaGfcugguscsg | 0.033 | 8.781 | 80.2 | 0.8 |

Note:
the target position is relative to human transcript NM_001384479.1; “A” refers to adenosine-3′-phosphate; “a” refers to 2′-O-methyladenosine-3′-phosphate; “Af” refers to 2′-fluoroadenosine-3′-phosphate; “dA” refers to 2′-deoxyadenosine-3-phosphate; “C” refers to cytidine-3′-phosphate; “c” refers to 2′-O-methylcytidine-3′-phosphate; “Cf” refers to 2′-fluorocytidine-3′-phosphate; “dC” refers to 2′-deoxycytidine-3′-phosphate; “G” refers to guanosine-3′-phosphate; “g” refers to 2′-O-methylguanosine-3′-phosphate; “Gf” refers to 2′-fluoroguanosine-3′-phosphate; “dG” refers to 2′-deoxyguanosine-3′-phosphate; “U” refers to uridine-3′-phosphate; “u” refers to 2′-O-methyluridine-3′-phosphate; “Uf” refers to 2′-fluorouridine-3′-phosphate; “T” refers to 5-methyluridine-3′-phosphate; “t” refers to 2′-O-methyl-5-methyluridine-3′-phosphate; “Tf” refers to 2′-fluoro-5-methyluridine-3′-phosphate; “dT” refers to 2′-deoxythymidine-3′-phosphate; “s” refers to 3′-phosphorothioate. Note that, in some instances, the passenger strand sequence is coupled to a targeting moiety (e.g., GalNAc or galactose (e.g., L96)) at the 3′ end of the passenger strand.

TABLE 5
Sequences for Transgenic Mice and Non-human Primate Study

| | Target | SEQ | | SEQ | | SEQ | | SEQ | |
|---|---|---|---|---|---|---|---|---|---|
| Duplex | Posi- | ID | | ID | Guide Base | ID | Passenger Structure | ID | Passenger Base |
| ID | tion | No | Guide Structure (5′-3′) | No | Sequence (5′-3′) | No | Code (5′-3′) | No | Sequence (5′-3′) |
| SRS- | 380 | 1038 | usAfsugccAfuauaUfaCfgGfaagccscsa | 1025 | UAUGCCAUAUAUACGGAAGCCCA | 1064 | gsgscuucCfgUfaUfauaugg | 1051 | GGCUUCCGUAUAUAUGGC |
| 001705 | | | | | | | caua | | AUA |
| SRS- | 784 | 1039 | usUfsgaacCfugucAfaUfcUfucucasgsc | 1026 | UUGAACCUGUCAAUCUUCUCAGC | 1065 | usgsagaaGfaUfuGfacaggu | 1052 | UGAGAAGAUUGACAGGUU |
| 001706 | | | | | | | ucaa | | CAA |
| SRS- | 785 | 1040 | usAfsugaaCfcuguCfaAfuCfuucucsasg | 1027 | UAUGAACCUGUCAAUCUUCUCAG | 1066 | gsasgaagAfuUfgAfcagguu | 1053 | GAGAAGAUUGACAGGUUC |
| 001707 | | | | | | | caua | | AUA |
| SRS- | 1269 | 1044 | usAfsuugcUfcaauUfuUfuGfcaggususc | 809 | UAUUGCUCAAUUUUUGCAGGUUC | 1070 | ascscugcAfaAfaAfuugagc | 937 | ACCUGCAAAAAUUGAGCA |
| 001711 | | | | | | | aaua | | AUA |
| SRS- | 1422 | 1046 | usUfsugauCfauacAfcAfgCfaaacasgsg | 814 | UUUGAUCAUACACAGCAAACAGG | 1072 | usgsuuugCfuGfuGfuaugau | 942 | UGUUUGCUGUGUAUGAUC |
| 001713 | | | | | | | caaa | | AAA |
| SRS- | 1762 | 1047 | usAfsaacaCfugguUfcUfuGfccucesesc | 1034 | UAAACACUGGUUCUUGCCUCCCC | 1073 | gsgsaggcAfaGfaAfccagug | 1060 | GGAGGCAAGAACCAGUGU |
| 001714 | | | | | | | uuua | | UUA |
| SRS- | 1816 | 1049 | usUfsuucaCfaaacAfaGfcUfggucgsgsu | 1036 | UUUUCACAAACAAGCUGGUCGGU | 1075 | csgsaccaGfcUfuGfuuugug | 1062 | CGACCAGCUUGUUUGUGA |
| 001716 | | | | | | | aaaa | | AAA |
| SRS- | 1817 | 1050 | usGfsuuucAfcaaaCfaAfgCfuggucsgsg | 1037 | UGUUUCACAAACAAGCUGGUCGG | 1076 | gsasccagCfuUfgUfuuguga | 1063 | GACCAGCUUGUUUGUGAA |
| 001717 | | | | | | | aaca | | ACA |

Note:
the target position is relative to human transcript NM_001384479.1; the corresponding sequence of a certain SEQ ID NO. is located on its right column of the same row. “A” refers to adenosine-3′-phosphate; “a” refers to 2′-O-methyladenosine-3′-phosphate; “Af” refers to 2′-fluoroadenosine-3′-phosphate; “dA” refers to 2′-deoxyadenosine-3-phosphate; “C” refers to cytidine-3′-phosphate; “c” refers to 2′-O-methylcytidine-3′-phosphate; “Cf” refers to 2′-fluorocytidine-3′-phosphate; “dC” refers to 2′-deoxycytidine-3′-phosphate; “G” refers to guanosine-3′-phosphate; “g” refers to 2′-O-methylguanosine-3′-phosphate; “Gf” refers to 2′-fluoroguanosine-3′-phosphate; “dG” refers to 2′-deoxyguanosine-3′-phosphate; “U” refers to uridine-3′-phosphate; “u” refers to 2′-O-methyluridine-3′-phosphate; “Uf” refers to 2′-fluorouridine-3′-phosphate; “T” refers to 5-methyluridine-3′-phosphate; “t” refers to 2′-O-methyl-5-methyluridine-3′-phosphate; “Tf” refers to 2′-fluoro-5-methyluridine-3′-phosphate; “dT” refers to 2′-deoxythymidine-3′-phosphate; “s” refers to 3′-phosphorothioate. Each modified passenger sequence is coupled to a targeting moiety (e.g., GalNAc or galactose) at its 3′ end via a linker (e.g., Formula V′, V′′′′, V′′′′′, or V′′′′′′).

TABLE 6
Percent Remaining Plasma AGT Relative to Day 0

| | | | Study Day | | | | |
|---|---|---|---|---|---|---|---|
| Duplex ID | Dose | Statistic | 0 | 7 | 14 | 21 | 28 |
| PBS | — | Mean | 100.0 | 105.8 | 99.0 | 85.7 | 80.9 |
| | | SD | 2.5 | 18.7 | 11.0 | 9.5 | 5.2 |
| | | N | 5 | 5 | 5 | 5 | 5 |
| SRS-001674 | 3 mg/kg | Mean | 100.0 | 18.1 | 15.2 | 18.5 | 22.1 |
| | | SD | 1.4 | 5.6 | 5.8 | 5.4 | 5.4 |
| | | N | 5 | 5 | 5 | 5 | 5 |
| SRS-001705 | 3 mg/kg | Mean | 100.0 | 21.6 | 20.7 | 23.0 | 16.5 |
| | | SD | 4.2 | 9.7 | 11.0 | 9.3 | 6.6 |
| | | N | 5 | 5 | 5 | 5 | 5 |
| SRS-001706 | 3 mg/kg | Mean | 100.0 | 17.4 | 16.2 | 16.5 | 22.3 |
| | | SD | 3.2 | 6.6 | 7.2 | 4.3 | 7.2 |
| | | N | 5 | 5 | 5 | 5 | 5 |
| SRS-001707 | 3 mg/kg | Mean | 100.0 | 20.0 | 26.1 | 34.3 | 28.0 |
| | | SD | 3.1 | 7.8 | 7.8 | 5.3 | 13.3 |
| | | N | 4 | 4 | 4 | 4 | 4 |
| SRS-001711 | 3 mg/kg | Mean | 100.0 | 7.6 | 9.0 | 9.4 | 17.9 |
| | | SD | 1.4 | 1.4 | 1.3 | 3.0 | 20.5 |
| | | N | 5 | 5 | 5 | 5 | 5 |
| SRS-001713 | 3 mg/kg | Mean | 100.0 | 14.8 | 14.7 | 14.2 | 16.6 |
| | | SD | 2.7 | 3.4 | 4.5 | 3.3 | 6.2 |
| | | N | 5 | 5 | 5 | 5 | 5 |
| SRS-001714 | 3 mg/kg | Mean | 100.0 | 17.3 | 29.3 | 36.3 | 38.7 |
| | | SD | 5.0 | 3.0 | 8.2 | 6.7 | 11.6 |
| | | N | 5 | 5 | 5 | 5 | 4 |
| SRS-001716 | 3 mg/kg | Mean | 100.0 | 12.5 | 10.3 | 11.2 | 11.0 |
| | | SD | 4.3 | 3.9 | 2.4 | 2.7 | 2.0 |
| | | N | 5 | 5 | 5 | 5 | 5 |
| SRS-001717 | 3 mg/kg | Mean | 100.0 | 10.7 | 10.5 | 8.7 | 8.8 |
| | | SD | 6.9 | 1.8 | 2.2 | 1.5 | 1.7 |
| | | N | 5 | 5 | 5 | 5 | 5 |

TABLE 7
Sequences for Transgenic Mice Study

| | Target | SEQ | | SEQ | | SEQ | | SEQ | |
|---|---|---|---|---|---|---|---|---|---|
| Duplex | Posi- | ID | | ID | Guide Strand Base | ID | Passenger Strand | ID | Passenger Strand Base |
| ID | tion | No | Guide Strand Sequence (5′-3′) | No | Sequence (5′-3′) | No | Sequence (5′-3′) | No | Sequence (5′-3′) |
| SRS- | 1800 | 1048 | usGfsucggUfuggaAfuUfcUfuuuugsgsa | 165 | UGUCGGUUGGAAUUCUUUUUGGA | 1074 | csasaaaaGfaAfuUfccaac | 549 | CAAAAAGAAUUCCAACCGACA |
| 001715 | | | | | | | cgaca | | |
| SRS- | 166 | 2111 | usUfscucaUfugugGfaUfgAfcgaggsusg | 2101 | UUCUCAUUGUGGAUGACGAGGUG | 2131 | cscsucguCfaUfcCfacaau | 2121 | CCUCGUCAUCCACAAUGAGAA |
| 001841 | | | | | | | gagaa | | |
| SRS- | 169 | 2112 | usUfsacucUfcauuGfuGfgAfugacgsasg | 2102 | UUACUCUCAUUGUGGAUGACGAG | 2132 | csgsucauCfcAfcAfaugag | 2122 | CGUCAUCCACAAUGAGAGUAA |
| 001842 | | | | | | | aguaa | | |
| SRS- | 373 | 2113 | usAfsuauaCfggaaGfcCfcAfagaagsusu | 2103 | UAUAUACGGAAGCCCAAGAAGUU | 2133 | csusucuuGfgGfcUfuccgu | 2123 | CUUCUUGGGCUUCCGUAUAUA |
| 001843 | | | | | | | auaua | | |
| SRS- | 1118 | 2114 | usAfsgggaGfuuuuGfcUfgGfaaagusgsa | 2104 | UAGGGAGUUUUGCUGGAAAGUGA | 2134 | ascsuuucCfaGfcAfaaacu | 2124 | ACUUUCCAGCAAAACUCCCUA |
| 001844 | | | | | | | cccua | | |
| SRS- | 1608 | 2115 | usUfsagaaGfaaaaGfgUfgGfgagacsusg | 2105 | UUAGAAGAAAAGGUGGGAGACUG | 2135 | gsuscuccCfaCfcUfuuucu | 2125 | GUCUCCCACCUUUUCUUCUAA |
| 001845 | | | | | | | ucuaa | | |
| SRS- | 1609 | 2116 | usUfsuagaAfgaaaAfgGfuGfggagascsu | 2106 | UUUAGAAGAAAAGGUGGGAGACU | 2136 | uscsucccAfcCfuUfuucuu | 2126 | UCUCCCACCUUUUCUUCUAAA |
| 001846 | | | | | | | cuaaa | | |
| SRS- | 1612 | 2117 | usUfscauuAfgaagAfaAfaGfgugggsasg | 2107 | UUCAUUAGAAGAAAAGGUGGGAG | 2137 | cscscaccUfuUfuCfuucua | 2127 | CCCACCUUUUCUUCUAAUGAA |
| 001847 | | | | | | | augaa | | |
| SRS- | 1614 | 2118 | usAfscucaUfuagaAfgAfaAfaggugsgsg | 2108 | UACUCAUUAGAAGAAAAGGUGGG | 2138 | csasccuuUfuCfuUfcuaau | 2128 | CACCUUUUCUUCUAAUGAGUA |
| 001848 | | | | | | | gagua | | |
| SRS- | 1652 | 345 | usAfsgaccAfaggaGfaAfaCfggcugscsu | 153 | UAGACCAAGGAGAAACGGCUGCU | 729 | csasgccgUfuUfcUfccuug | 537 | CAGCCGUUUCUCCUUGGUCUA |
| 001849 | | | | | | | gucua | | |

Note:
the target position is relative to human transcript NM_001384479.1; the corresponding sequence of a certain SEQ ID NO. is located on its right column of the same row. “A” refers to adenosine-3′-phosphate; “a” refers to 2′-O-methyladenosine-3′-phosphate; “Af” refers to 2′-fluoroadenosine-3′-phosphate; “dA” refers to 2′-deoxyadenosine-3-phosphate; “C” refers to cytidine-3′-phosphate; “c” refers to 2′-O-methylcytidine-3′-phosphate; “Cf” refers to 2′-fluorocytidine-3′-phosphate; “dC” refers to 2′-deoxycytidine-3′-phosphate; “G” refers to guanosine-3′-phosphate; “g” refers to 2′-O-methylguanosine-3′-phosphate; “Gf” refers to 2′-fluoroguanosine-3′-phosphate; “dG” refers to 2′-deoxyguanosine-3′-phosphate; “U” refers to uridine-3′-phosphate; “u” refers to 2′-O-methyluridine-3′-phosphate; “Uf” refers to 2′-fluorouridine-3′-phosphate; “T” refers to 5-methyluridine-3′-phosphate; “t” refers to 2′-O-methyl-5-methyluridine-3′-phosphate; “Tf” refers to 2′-fluoro-5-methyluridine-3′-phosphate; “dT” refers to 2′-deoxythymidine-3′-phosphate; “s” refers to 3′-phosphorothioate. Each modified passenger strand sequence is coupled to a targeting moiety (e.g., GalNAc or galactose) at its 3′ end via a linker (e.g., Formula V′, V′′′′, V′′′′′′, or V′′′′′′).

TABLE 8
Percent Remaining Plasma AGT Relative to Day 0

| | | | Study Day | | | | |
|---|---|---|---|---|---|---|---|
| Duplex ID | Dose | Statistic | 0 | 7 | 14 | 21 | 28 |
| PBS | — | Mean | 100.0 | 88.9 | 118.9 | 102.2 | 105.8 |
| | | SD | 2.7 | 4.7 | 5.9 | 4.1 | 16.3 |
| | | N | 2 | 2 | 2 | 2 | 2 |
| SRS-001674 | 3 mg/kg | Mean | 100.0 | 6.3 | 10.6 | 9.7 | 26.2 |
| | | SD | 4.7 | 2.3 | 4.2 | 4.9 | 12.4 |
| | | N | 4 | 4 | 4 | 4 | 4 |
| SRS-001841 | 3 mg/kg | Mean | 100.0 | 8.8 | 16.1 | 13.6 | 22.2 |
| | | SD | 3.0 | 3.6 | 7.0 | 4.5 | 6.7 |
| | | N | 4 | 4 | 4 | 4 | 4 |
| SRS-001842 | 3 mg/kg | Mean | 100.0 | 9.1 | 12.9 | 7.5 | 13.1 |
| | | SD | 2.1 | 4.3 | 5.4 | 5.1 | 7.5 |
| | | N | 5 | 5 | 5 | 5 | 5 |
| SRS-001843 | 3 mg/kg | Mean | 100.0 | 25.9 | 33.4 | 31.5 | 50.6 |
| | | SD | 5.5 | 5.5 | 9.6 | 9.0 | 16.3 |
| | | N | 5 | 5 | 5 | 5 | 5 |
| SRS-001844 | 3 mg/kg | Mean | 100.0 | 20.2 | 20.7 | 27.4 | 35.2 |
| | | SD | 4.3 | 8.8 | 7.4 | 6.3 | 13.0 |
| | | N | 5 | 5 | 5 | 5 | 5 |
| SRS-001845 | 3 mg/kg | Mean | 100.0 | 11.0 | 9.2 | 12.1 | 17.1 |
| | | SD | 4.1 | 2.4 | 2.0 | 4.3 | 11.0 |
| | | N | 5 | 5 | 5 | 5 | 5 |
| SRS-001846 | 3 mg/kg | Mean | 100.0 | 10.1 | 8.3 | 10.6 | 11.4 |
| | | SD | 2.2 | 4.1 | 2.9 | 5.6 | 3.9 |
| | | N | 5 | 5 | 5 | 5 | 5 |
| SRS-001847 | 3 mg/kg | Mean | 100.0 | 9.3 | 9.8 | 9.9 | 11.0 |
| | | SD | 3.3 | 4.5 | 3.6 | 2.7 | 3.7 |
| | | N | 5 | 5 | 5 | 5 | 5 |
| SRS-001848 | 3 mg/kg | Mean | 100.0 | 11.5 | 9.0 | 10.3 | 11.0 |
| | | SD | 1.7 | 5.6 | 4.8 | 6.5 | 7.5 |
| | | N | 4 | 4 | 4 | 4 | 4 |
| SRS-001849 | 3 mg/kg | Mean | 100.0 | 8.2 | 9.4 | 13.2 | 14.6 |
| | | SD | 2.0 | 3.3 | 2.6 | 11.0 | 5.5 |
| | | N | 5 | 5 | 5 | 5 | 5 |
| SRS-001715 | 3 mg/kg | Mean | 100.0 | 16.2 | 13.8 | 15.0 | 18.3 |
| | | SD | 6.3 | 5.0 | 6.1 | 4.9 | 7.9 |
| | | N | 4 | 4 | 4 | 4 | 4 |

TABLE 9
Sequences for Transgenic Mice Study

| | Target | SEQ | | SEQ | | SEQ | | SEQ | |
|---|---|---|---|---|---|---|---|---|---|
| Duplex | Posi- | ID | | ID | Guide Base | ID | Passenger Structure Code | ID | Passenger Base |
| ID | tion | No | Guide Structure (5′-3′) | No | Sequence (5′-3′) | No | (5′-3′) | No | Sequence (5′-3′) |
| SRS- | 1269 | 1044 | usAfsuugcUfcaauUfuUfuGfcaggususc | 809 | UAUUGCUCAAUUUUUGCAGGUUC | 1070 | ascscugcAfaAfaAfuugagca | 937 | ACCUGCAAAAAUUGA |
| 001711 | | | | | | | aua | | GCAAUA |
| SRS- | 1269 | 2161 | usAfsuug(dAB)UfcaauUfuUfuGfcagg | 2151 | UAUUGUCAAUUUUUGCAGGUUC | 1070 | ascscugcAfaAfaAfuugagca | 937 | ACCUGCAAAAAUUGA |
| 002054 | | | ususc | | | | aua | | GCAAUA |
| SRS- | 1269 | 2162 | usAfsuugc(dAB)caauUfuUfuGfcaggu | 2152 | UAUUGCCAAUUUUUGCAGGUUC | 1070 | ascscugcAfaAfaAfuugagca | 937 | ACCUGCAAAAAUUGA |
| 002055 | | | susc | | | | aua | | GCAAUA |
| SRS- | 1269 | 2163 | usAfsuugcUf(dAB)aauUfuUfuGfcagg | 2153 | UAUUGCUAAUUUUUGCAGGUUC | 1070 | ascscugcAfaAfaAfuugagca | 937 | ACCUGCAAAAAUUGA |
| 002056 | | | ususc | | | | aua | | GCAAUA |
| SRS- | 1269 | 2164 | usAfsuug(T-NAc) | 2154 | UAUUGUCAAUUUUUGCAGGUUC | 1070 | ascscugcAfaAfaAfuugagca | 937 | ACCUGCAAAAAUUGA |
| 002057 | | | UfcaauUfuUfuGfcaggususc | | | | aua | | GCAAUA |
| SRS- | 1269 | 2165 | usAfsuugc(T-NAc) | 2155 | UAUUGCCAAUUUUUGCAGGUUC | 1070 | ascscugcAfaAfaAfuugagca | 937 | ACCUGCAAAAAUUGA |
| 002058 | | | caauUfuUfuGfcaggususc | | | | aua | | GCAAUA |
| SRS- | 1269 | 2166 | usAfsuugcUf(T-NAc) | 2156 | UAUUGCUAAUUUUUGCAGGUUC | 1070 | ascscugcAfaAfaAfuugagca | 937 | ACCUGCAAAAAUUGA |
| 002059 | | | aauUfuUfuGfcaggususc | | | | aua | | GCAAUA |
| SRS- | 1269 | 2167 | usAfsuugc(T-T) | 2157 | UAUUGCTCAAUUUUUGCAGGUUC | 1070 | ascscugcAfaAfaAfuugagca | 937 | ACCUGCAAAAAUUGA |
| 002060 | | | caauUfuUfuGfcaggususc | | | | aua | | GCAAUA |
| SRS- | 1269 | 2168 | us Afsuugc(Tgn) | 2158 | UAUUGCTCAAUUUUUGCAGGUUC | 1070 | ascscugcAfaAfaAfuugagca | 937 | ACCUGCAAAAAUUGA |
| 002061 | | | caauUfuUfuGfcaggususc | | | | aua | | GCAAUA |
| SRS- | 1269 | 2169 | usAfsuugc(T-NAc) | 2159 | UAUUGCCAAUUUUUGCAGGUUC | 2181 | ascscugcAfaAfaAfuugalgc | 937 | ACCUGCAAAAAUUGA |
| 002084 | | | caauUfuUfuGfcaggususc | | | | aaua | | GCAAUA |

Note:
the target position is relative to human transcript NM_001384479.1; the corresponding sequence of a certain SEQ ID NO. is located on its right column of the same row. “A” refers to adenosine-3′-phosphate; “a” refers to 2′-O-methyladenosine-3′-phosphate; “Af” refers to 2′-fluoroadenosine-3′-phosphate; “dA” refers to 2′-deoxyadenosine-3-phosphate; “af” refers to 2-Amino-2′-O-methyladenosine-3′-phosphate; “C” refers to cytidine-3′-phosphate; “c” refers to 2′-O-methylcytidine-3′-phosphate; “Cf” refers to 2′-fluorocytidine-3′-phosphate; “dC” refers to 2′-deoxycytidine-3′-phosphate; “G” refers to guanosine-3′-phosphate; ″g” refers to 2′-O-methylguanosine-3′-phosphate; “Gf” refers to 2′-fluoroguanosine-3′-phosphate; “dG” refers to 2′-deoxyguanosine-3′-phosphate; “U” refers to uridine-3′-phosphate; “u” refers to 2′-O-methyluridine-3′-phosphate; “Uf” refers to 2′-fluorouridine-3′-phosphate; “T” refers to 5-methyluridine-3′-phosphate; “t” refers to 2′-O-methyl-5-methyluridine-3′-phosphate; “Tf” refers to 2′-fluoro-5-methyluridine-3′-phosphate; “dT” refers to 2′-deoxythymidine-3′-phosphate; “s” refers to 3′-phosphorothioate; “(T-T)” refers to acyclic L-threoninol nucleic acid-thymine-3′-phosphate; “(T-NAc)” refers to acyclic N-acetyl L-threoninol abasic nucleic acid-3′phosphate; “(dAB)”refers to 1′,2′-Dideoxyribose-3′phosphate; “(Tgn)” refers to thymidine-glycol nucleic acid (GNA) S-isomer; Each modified passenger sequence is coupled to a targeting moiety (e.g., GalNAc or galactose) at its 3′ end via a linker (e.g., Formula V′, V′′′′, V′′′′′, or V′′′′′′).

TABLE 10
Percent Remaining Plasma AGT Relative to Pre-Dose Average

| | | | Study Day | | | | | | |
|---|---|---|---|---|---|---|---|---|---|
| Duplex ID | Dose | Statistic | −7 | 0 | 7 | 14 | 21 | 28 | 35 |
| PBS | — | Mean | 104.9 | 95.1 | 89.0 | 93.9 | 92.1 | 91.6 | 99.1 |
| | | SD | 11.7 | 11.7 | 7.8 | 20.9 | 12.6 | 12.0 | 9.3 |
| | | N | 5 | 5 | 5 | 5 | 5 | 5 | 5 |
| SRS-001711 | 3 mg/kg | Mean | 101.7 | 98.3 | 9.2 | 9.5 | 7.8 | 11.2 | 14.5 |
| | | SD | 12.6 | 12.6 | 2.3 | 3.3 | 2.2 | 1.5 | 2.9 |
| | | N | 5 | 5 | 5 | 5 | 5 | 5 | 5 |
| SRS-002054 | 3 mg/kg | Mean | 98.7 | 101.3 | 31.7 | 46.7 | 61.0 | 100.8 | 137.6 |
| | | SD | 6.5 | 6.5 | 12.0 | 15.7 | 20.2 | 35.0 | 42.6 |
| | | N | 5 | 5 | 5 | 5 | 5 | 5 | 5 |
| SRS-002055 | 3 mg/kg | Mean | 101.4 | 98.2 | 12.6 | 11.3 | 11.1 | 20.7 | 30.7 |
| | | SD | 7.8 | 8.8 | 3.4 | 3.2 | 4.0 | 8.2 | 9.5 |
| | | N | 5 | 4 | 5 | 5 | 5 | 5 | 5 |
| SRS-002056 | 3 mg/kg | Mean | 93.8 | 106.6 | 43.3 | 44.2 | 50.0 | 74.2 | 85.7 |
| | | SD | 9.3 | 9.5 | 14.7 | 12.0 | 16.5 | 28.1 | 22.3 |
| | | N | 5 | 5 | 5 | 5 | 5 | 5 | 5 |
| SRS-002057 | 3 mg/kg | Mean | 100.8 | 99.2 | 20.3 | 30.9 | 48.6 | 86.2 | 108.6 |
| | | SD | 8.4 | 8.4 | 4.4 | 4.4 | 10.2 | 23.3 | 27.4 |
| | | N | 5 | 5 | 5 | 5 | 5 | 5 | 5 |
| SRS-002058 | 3 mg/kg | Mean | 100.0 | 100.0 | 18.0 | 16.1 | 19.6 | 35.8 | 50.9 |
| | | SD | 7.8 | 7.8 | 5.7 | 5.7 | 5.7 | 11.2 | 17.1 |
| | | N | 5 | 5 | 5 | 5 | 5 | 5 | 5 |
| SRS-002084 | 3 mg/kg | Mean | 99.5 | 100.4 | 19.7 | 18.6 | 24.0 | 37.3 | 45.3 |
| | | SD | 4.9 | 4.8 | 7.2 | 7.7 | 8.9 | 16.5 | 20.7 |
| | | N | 5 | 5 | 5 | 5 | 5 | 5 | 5 |
| SRS-002059 | 3 mg/kg | Mean | 104.1 | 95.9 | 68.0 | 65.4 | 73.5 | 87.1 | 85.6 |
| | | SD | 4.7 | 4.7 | 11.6 | 18.5 | 24.9 | 18.9 | 15.9 |
| | | N | 5 | 5 | 5 | 5 | 5 | 5 | 5 |
| SRS-002060 | 3 mg/kg | Mean | 105.8 | 94.2 | 15.4 | 14.1 | 11.7 | 15.7 | 25.2 |
| | | SD | 10.7 | 10.7 | 7.9 | 7.0 | 4.5 | 3.8 | 6.7 |
| | | N | 5 | 5 | 5 | 5 | 5 | 5 | 5 |
| SRS-002061 | 3 mg/kg | Mean | 106.2 | 93.8 | 12.0 | 11.4 | 10.4 | 12.2 | 16.7 |
| | | SD | 7.7 | 7.7 | 5.0 | 3.2 | 4.1 | 4.6 | 2.9 |
| | | N | 4 | 4 | 4 | 4 | 4 | 4 | 4 |

TABLE 11
Sequences for Transgenic Mice Study

| | Target | SEQ | | SEQ | | SEQ | | SEQ | |
|---|---|---|---|---|---|---|---|---|---|
| Duplex | Posi- | ID | | ID | Guide Base | ID | Passenger Structure Code | ID | Passenger Base |
| ID | tion | No | Guide Structure (5′-3′) | No | Sequence (5′-3′) | No | (5′-3′) | No | Sequence (5′-3′) |
| SRS- | 1422 | 2201 | usUfsugauCfauacAfcAfgCfaaacasgsg | 814 | UUUGAUCAUACACAGCAAACAGG | 2223 | usgsuuugCfuGfuGfuaugauca | 942 | UGUUUGCUGUGUAUG |
| 002085 | | | | | | | aa | | AUCAAA |
| SRS- | 1422 | 2202 | usUfsugauCf(T-NAc) | 2191 | UUUGAUCUACACAGCAAACAGG | 2224 | usgsuuugCfuGfuGfuaagauca | 2213 | UGUUUGCUGUGUAAG |
| 002086 | | | uacAfcAfgCfaaacasgsg | | | | aa | | AUCAAA |
| SRS- | 1422 | 2203 | usUfsugauCf(T-NAc) | 2192 | UUUGAUCUACACAGCAAACAGG | 2225 | usgsuuugCfuGfuGfuaalgauc | 2213 | UGUUUGCUGUGUAAG |
| 002087 | | | uacAfcAfgCfaaacasgsg | | | | aaa | | AUCAAA |
| SRS- | 1652 | 345 | usAfsgaccAfaggaGfaAfaCfggcugscsu | 153 | UAGACCAAGGAGAAACGGCUGCU | 729 | csasgccgUfuUfcUfccuugguc | 537 | CAGCCGUUUCUCCUU |
| 002088 | | | | | | | ua | | GGUCUA |
| SRS- | 1652 | 2205 | usAfsgacc(T-NAc) | 2194 | UAGACCAGGAGAAACGGCUGCU | 2227 | csasgccgUfuUfcUfccuagguc | 2216 | CAGCCGUUUCUCCUA |
| 002089 | | | aggaGfaAfaCfggcugscsu | | | | ua | | GGUCUA |
| SRS- | 1652 | 2206 | usAfsgacc(T-NAc) | 2195 | UAGACCAGGAGAAACGGCUGCU | 2228 | csasgccgUfuUfcUfccualggu | 2216 | CAGCCGUUUCUCCUA |
| 002090 | | | aggaGfaAfaCfggcugscsu | | | | cua | | GGUCUA |
| SRS- | 1652 | 2207 | usAfsgaccAf(T-NAc) | 2196 | UAGACCAGGAGAAACGGCUGCU | 2229 | csasgccgUfuUfcUfccaugguc | 2218 | CAGCCGUUUCUCCAU |
| 002091 | | | ggaGfaAfaCfggcugscsu | | | | ua | | GGUCUA |
| SRS- | 1652 | 2208 | usAfsgaccAf(T-NAc) | 2197 | UAGACCAGGAGAAACGGCUGCU | 2230 | csasgccgUfuUfcUfccaluggu | 2218 | CAGCCGUUUCUCCAU |
| 002092 | | | ggaGfaAfaCfggcugscsu | | | | acu | | GGUCUA |
| SRS- | 1800 | 1048 | usGfsucggUfuggaAfuUfcUfuuuugsgsa | 165 | UGUCGGUUGGAAUUCUUUUUGGA | 1074 | csasaaaaGfaAfuUfccaaccga | 549 | CAAAAAGAAUUCCAA |
| 002093 | | | | | | | ca | | CCGACA |
| SRS- | 1800 | 2210 | usGfsucgg(T-NAc) | 2199 | UGUCGGUGGAAUUCUUUUUGGA | 2232 | csasaaaaGfaAfuUfccagccga | 2221 | CAAAAAGAAUUCCAG |
| 002094 | | | uggaAfuUfcUfuuuugsgsa | | | | ca | | CCGACA |
| SRS- | 1800 | 2211 | usGfsucggUf(T-NAc) | 2199 | UGUCGGUGGAAUUCUUUUUGGA | 2233 | csasaaaaGfaAfuUfccgaccga | 2222 | CAAAAAGAAUUCCGA |
| 002095 | | | ggaAfuUfcUfuuuugsgsa | | | | ca | | CCGACA |

Note:
the target position is relative to human transcript NM_001384479.1; the corresponding sequence of a certain SEQ ID NO. is located on its right column of the same row. “A” refers to adenosine-3′-phosphate; “a” refers to 2′-O-methyladenosine-3′-phosphate; “Af” refers to 2′-fluoroadenosine-3′-phosphate; “dA” refers to 2′-deoxyadenosine-3-phosphate; “al” refers to 2-Amino-2′-O-methyladenosine-3′-phosphate; “C” refers to cytidine-3′-phosphate; “c” refers to 2′-O-methylcytidine-3′-phosphate; “Cf” refers to 2′-fluorocytidine-3′-phosphate; “dC” refers to 2′-deoxycytidine-3′-phosphate; “G” refers to guanosine-3′-phosphate; “g” refers to 2′-O-methylguanosine-3′-phosphate; “Gf” refers to 2′-fluoroguanosine-3′-phosphate; “dG” refers to 2′-deoxyguanosine-3′-phosphate; “U” refers to uridine-3′-phosphate; “u” refers to 2′-O-methyluridine-3′-phosphate; “Uf” refers to 2′-fluorouridine-3′-phosphate; “T” refers to 5-methyluridine-3′-phosphate; “t” refers to 2′-O-methyl-5-methyluridine-3′-phosphate; “Tf” refers to 2′-fluoro-5-methyluridine-3′-phosphate; “dT” refers to 2′-deoxythymidine-3′-phosphate; “s” refers to 3′-phosphorothioate; “(T-T)” refers to acyclic L-threoninol nucleic acid-thymine-3′-phosphate; “(T-NAc)” refers to acyclic N-acetyl L-threoninol abasic nucleic acid-3′phosphate; “(dAB)” refers to 1′,2′-Dideoxyribose-3′phosphate; “(Tgn)” refers to thymidine-glycol nucleic acid (GNA) S-isomer; Each modified passenger sequence is coupled to a targeting moiety (e.g., GalNAc or galactose) at its 3′ end via a linker (e.g., Formula V′, V′′′′, V′′′′′, or V′′′′′′), preferably via linker formula V′′′′.

TABLE 12
Percent Remaining Plasma AGT Relative to Pre-Dose Average

| | | | Study Day | | |
|---|---|---|---|---|---|
| Duplex ID | Dose | Statistic | −7 | 0 | 28 |
| PBS | — | Mean | 108.0 | 92.0 | 170.0 |
| | | SD | 9.5 | 9.5 | 32.1 |
| | | N | 5 | 5 | 5 |
| SRS-002085 | 3 mg/kg | Mean | 110.1 | 89.9 | 40.3 |
| | | SD | 12.3 | 12.3 | 9.4 |
| | | N | 4 | 4 | 4 |
| SRS-002086 | 3 mg/kg | Mean | 97.8 | 102.2 | 99.4 |
| | | SD | 12.6 | 12.6 | 5.4 |
| | | N | 4 | 4 | 4 |
| SRS-002087 | 3 mg/kg | Mean | 112.3 | 87.7 | 114.3 |
| | | SD | 8.8 | 8.8 | 18.9 |
| | | N | 4 | 4 | 4 |
| SRS-002088 | 3 mg/kg | Mean | 91.8 | 108.2 | 21.4 |
| | | SD | 10.4 | 10.4 | 2.3 |
| | | N | 4 | 4 | 4 |
| SRS-002089 | 3 mg/kg | Mean | 96.4 | 103.6 | 130.7 |
| | | SD | 26.8 | 26.8 | 15.3 |
| | | N | 5 | 5 | 5 |
| SRS-002090 | 3 mg/kg | Mean | 97.0 | 103.0 | 113.8 |
| | | SD | 15.1 | 15.1 | 7.3 |
| | | N | 4 | 4 | 4 |
| SRS-002091 | 3 mg/kg | Mean | 109.3 | 90.7 | 114.8 |
| | | SD | 16.4 | 16.4 | 3.1 |
| | | N | 4 | 4 | 4 |
| SRS-002092 | 3 mg/kg | Mean | 87.0 | 113.0 | 93.8 |
| | | SD | 12.2 | 12.2 | 22.7 |
| | | N | 4 | 4 | 4 |
| SRS-002093 | 3 mg/kg | Mean | 93.6 | 106.4 | 32.4 |
| | | SD | 17.1 | 17.1 | 15.9 |
| | | N | 4 | 4 | 4 |
| SRS-002094 | 3 mg/kg | Mean | 96.0 | 104.0 | 17.2 |
| | | SD | 14.6 | 14.6 | 12.8 |
| | | N | 4 | 4 | 4 |
| SRS-002095 | 3 mg/kg | Mean | 104.9 | 95.1 | 19.7 |
| | | SD | 14.0 | 14.0 | 9.0 |
| | | N | 4 | 4 | 4 |

TABLE 13
Sequences for Transgenic Mice Study

| | Target | SEQ | | SEQ | | SEQ | | SEQ | |
|---|---|---|---|---|---|---|---|---|---|
| Duplex | Posi- | ID | | ID | Guide Base | ID | Passenger Structure | ID | |
| ID | tion | No | Guide Structure (5′-3′) | No | Sequence (5′-3′) | No | Code (5′-3′) | No | Passenger Base |
| SRS- | 1269 | 1044 | usAfsuugcUfcaauUfuUfuGfcaggu | 809 | UAUUGCUCAAUUUUUGCAGGUUC | 1070 | ascscugcAfaAfaAfuugagca | 937 | ACCUGCAAAAAUUGAGCAAUA |
| 001711 | | | susc | | | | aua | | |
| SRS- | 1800 | 1048 | usGfsucggUfuggaAfuUfcUfuuuug | 165 | UGUCGGUUGGAAUUCUUUUUGGA | 1074 | csasaaaaGfaAfuUfccaaceg | 549 | CAAAAAGAAUUCCAACCGACA |
| 001715 | | | sgsa | | | | aca | | |
| SRS- | 1652 | 345 | usAfsgaccAfaggaGfaAfaCfggcug | 153 | UAGACCAAGGAGAAACGGCUGCU | 729 | csasgccgUfuUfcUfccuuggu | 537 | CAGCCGUUUCUCCUUGGUCUA |
| 001849 | | | scsu | | | | cua | | |
| SRS- | 1269 | 2255 | usAfsuugcUfcaauU3fuUfuGfcagg | 809 | UAUUGCUCAAUUUUUGCAGGUUC | 1070 | ascscugcAfaAfaAfuugagca | 937 | ACCUGCAAAAAUUGAGCAAUA |
| 002365 | | | ususc | | | | aua | | |
| SRS- | 1269 | 2256 | usAfsu3ugcUfcaauUfuUfuGfcagg | 809 | UAUUGCUCAAUUUUUGCAGGUUC | 1070 | ascscugcAfaAfaAfuugagca | 937 | ACCUGCAAAAAUUGAGCAAUA |
| 002366 | | | ususc | | | | aua | | |
| SRS- | 1269 | 2257 | usAfsuugCf(T-T) | 2245 | UAUUGCTCAAUUUUUGCAGGUUC | 1070 | ascscugcAfaAfaAfuugagca | 937 | ACCUGCAAAAAUUGAGCAAUA |
| 002367 | | | caauUfuUfuGfcaggususc | | | | aua | | |
| SRS- | 1269 | 2258 | usAfsuugCf(T-T) | 2246 | UAUUGCTCAAUUUUUGCAGGUUC | 1070 | ascscugcAfaAfaAfuugagca | 937 | ACCUGCAAAAAUUGAGCAAUA |
| 002368 | | | caauU3fuUfuGfcaggususc | | | | aua | | |
| SRS- | 1269 | 2259 | usAfsuugc(T-T) | 2247 | UAUUGCTCAAUUUUUGCAGGUUC | 1070 | ascscugcAfaAfaAfuugagca | 937 | ACCUGCAAAAAUUGAGCAAUA |
| 002369 | | | CfaauUfuUfuGfcaggususc | | | | aua | | |
| SRS- | 1652 | 2260 | usAfsgacCf(T-A) | 153 | UAGACCAAGGAGAAACGGCUGCU | 729 | csasgccgUfuUfcUfccuuggu | 537 | CAGCCGUUUCUCCUUGGUCUA |
| 002370 | | | aggaGfaAfaCfggcugscsu | | | | cua | | |
| SRS- | 1800 | 2261 | usGfsucgGf(T-T) | 2249 | UGUCGGTUGGAAUUCUUUUUGGA | 1074 | csasaaaaGfaAfuUfccaaccg | 549 | CAAAAAGAAUUCCAACCGACA |
| 002371 | | | uggaAfuUfcUfuuuugsgsa | | | | aca | | |
| SRS- | 1268 | 2262 | usUfsugc(T-T) | 2250 | UUUGCTCAAUUUUUGCAGGUCCA | 2286 | gsasccugCfaAfaAfauugagc | 2274 | GACCUGCAAAAAUUGAGCAAA |
| 002372 | | | CfaauuUfuUfgCfaggucscsa | | | | aaa | | |
| SRS- | 1270 | 2263 | usCfsauugCf(T-T) | 2251 | UCAUUGCTCAAUUUUUGCAGGUU | 2287 | cscsugcaAfaAfaUfugagcaa | 2275 | CCUGCAAAAAUUGAGCAAUGA |
| 002373 | | | caaUfuUfuUfgcaggsusu | | | | uga | | |

Note:
the target position is relative to human transcript NM_001384479.1; the corresponding sequence of a certain SEQ ID NO. is located on its right column of the same row. “A” refers to adenosine-3′-phosphate; “a” refers to 2′-O-methyladenosine-3′-phosphate; “Af” refers to 2′-fluoroadenosine-3′-phosphate; “dA” refers to 2′-deoxyadenosine-3-phosphate; “al” refers to 2-Amino-2′-O-methyladenosine-3′-phosphate; “C” refers to cytidine-3′-phosphate; “c” refers to 2′-O-methylcytidine-3′-phosphate; “Cf” refers to 2′-fluorocytidine-3′-phosphate; “dC” refers to 2′-deoxycytidine-3′-phosphate; “G” refers to guanosine-3′-phosphate; “g” refers to 2′-O-methylguanosine-3′-phosphate; “Gf” refers to 2′-fluoroguanosine-3′-phosphate; “dG” refers to 2′-deoxyguanosine-3′-phosphate; “U” refers to uridine-3′-phosphate; “u” refers to 2′-O-methyluridine-3′-phosphate; “Uf” refers to 2′-fluorouridine-3′-phosphate; “u3” refers to 2′-O-methyl-2-thiouridine-3′-phosphate; “U3f” refers to 2′-fluoro-2-thiouridine-3′-phosphate; “T” refers to 5-methyluridine-3′-phosphate; “t″ refers to 2′-O-methyl-5-methyluridine-3′-phosphate; “Tf” refers to 2′-fluoro-5-methyluridine-3′-phosphate; “dT” refers to 2′-deoxythymidine-3′-phosphate; “s” refers to 3′-phosphorothioate; “(T-T)” refers to acyclic L-threoninol nucleic acid-thymine-3′-phosphate; “(T-A)” refers to acyclic L-threoninol nucleic acid-adenine-3′-phosphate; “(T-NAc)″ refers to acyclic N-acetyl L threoninol abasic nucleic acid-3′phosphate; “(dAB)” refers to 1′,2′-Dideoxyribose-3′phosphate; “(Tgn)” refers to thymidine-glycol nucleic acid (GNA) S-isomer; Each modified passenger sequence is coupled to a targeting moiety (e.g., GalNAc or galactose) at its 3′ end via a linker (e.g., Formula V′, V′′′′, V′′′′, or V′′′′′′).

TABLE 14
Percent Remaining Plasma AGT Relative to Pre-Dose Average

| | | | Study Day | | | | | | | |
|---|---|---|---|---|---|---|---|---|---|---|
| Duplex ID | Dose | Statistic | −7 | 0 | 7 | 14 | 21 | 28 | 35 | 42 |
| PBS | — | Mean | 112.1 | 87.9 | 104.9 | 105.6 | 129.9 | 135.7 | 126.4 | 138.6 |
| | | SD | 10.7 | 10.7 | 15.8 | 24.9 | 14.3 | 15.4 | 28.2 | 28.0 |
| | | N | 4 | 4 | 4 | 4 | 4 | 4 | 4 | 4 |
| SRS-001711 | 2 mg/kg | Mean | 93.2 | 106.8 | 13.6 | 16.8 | 13.2 | 12.5 | 17.4 | 32.1 |
| | | SD | 2.1 | 2.1 | 5.1 | 4.1 | 5.1 | 2.0 | 4.3 | 8.6 |
| | | N | 4 | 4 | 4 | 4 | 4 | 4 | 4 | 4 |
| SRS-002365 | 2 mg/kg | Mean | 106.0 | 94.0 | 17.8 | 20.0 | 20.2 | 22.8 | 31.5 | 41.0 |
| | | SD | 11.5 | 11.5 | 4.9 | 8.4 | 9.0 | 7.7 | 11.9 | 12.5 |
| | | N | 4 | 4 | 4 | 4 | 4 | 4 | 4 | 4 |
| SRS-002366 | 2 mg/kg | Mean | 93.6 | 106.4 | 15.0 | 14.0 | 11.0 | 12.4 | 19.1 | 29.2 |
| | | SD | 3.1 | 3.1 | 5.2 | 3.1 | 6.0 | 6.5 | 7.3 | 8.1 |
| | | N | 4 | 4 | 4 | 4 | 4 | 4 | 4 | 4 |
| SRS-002367 | 2 mg/kg | Mean | 105.4 | 94.6 | 25.2 | 23.0 | 28.3 | 57.3 | 44.6 | 55.8 |
| | | SD | 10.0 | 10.0 | 7.9 | 4.9 | 8.8 | 33.3 | 10.1 | 16.1 |
| | | N | 4 | 4 | 4 | 4 | 4 | 4 | 4 | 4 |
| SRS-002368 | 2 mg/kg | Mean | 96.7 | 103.3 | 30.2 | 36.4 | 34.3 | 43.4 | 55.3 | 78.8 |
| | | SD | 7.5 | 7.5 | 9.0 | 18.4 | 18.2 | 23.1 | 15.0 | 30.9 |
| | | N | 4 | 4 | 4 | 4 | 4 | 4 | 4 | 4 |
| SRS-002369 | 2 mg/kg | Mean | 97.9 | 102.1 | 30.8 | 28.1 | 30.9 | 33.6 | 51.5 | 69.9 |
| | | SD | 13.5 | 13.5 | 12.5 | 5.7 | 10.2 | 8.9 | 15.4 | 25.0 |
| | | N | 4 | 4 | 4 | 4 | 4 | 4 | 4 | 4 |
| SRS-001849 | 2 mg/kg | Mean | 104.7 | 95.3 | 14.8 | 12.0 | 13.2 | 16.0 | 19.0 | 22.5 |
| | | SD | 4.6 | 4.6 | 5.5 | 3.0 | 6.3 | 7.5 | 7.1 | 7.3 |
| | | N | 4 | 4 | 4 | 4 | 4 | 4 | 4 | 4 |
| SRS-002370 | 2 mg/kg | Mean | 99.3 | 100.7 | 15.8 | 15.4 | 20.4 | 27.1 | 28.5 | 44.5 |
| | | SD | 5.6 | 5.6 | 10.0 | 5.9 | 4.1 | 2.5 | 6.9 | 11.1 |
| | | N | 4 | 4 | 4 | 4 | 4 | 4 | 4 | 4 |
| SRS-001715 | 2 mg/kg | Mean | 106.4 | 93.6 | 31.0 | 20.8 | 21.1 | 30.1 | 30.7 | 40.5 |
| | | SD | 5.9 | 5.9 | 6.5 | 3.2 | 7.6 | 8.2 | 7.3 | 6.9 |
| | | N | 4 | 4 | 4 | 4 | 4 | 4 | 4 | 4 |
| SRS-002371 | 2 mg/kg | Mean | 94.0 | 106.0 | 16.8 | 18.0 | 20.7 | 25.0 | 24.8 | 31.7 |
| | | SD | 10.8 | 10.8 | 3.2 | 9.7 | 9.4 | 12.7 | 11.3 | 14.3 |
| | | N | 4 | 4 | 4 | 4 | 4 | 4 | 4 | 4 |
| SRS-002372 | 2 mg/kg | Mean | 96.2 | 103.8 | 29.5 | 40.3 | 45.2 | 67.4 | 69.8 | 89.2 |
| | | SD | 3.5 | 3.5 | 3.6 | 5.2 | 4.2 | 11.5 | 8.3 | 7.5 |
| | | N | 4 | 4 | 4 | 4 | 4 | 4 | 4 | 4 |
| SRS-002373 | 2 mg/kg | Mean | 99.8 | 100.2 | 27.6 | 22.5 | 24.7 | 23.3 | 25.8 | 30.3 |
| | | SD | 7.8 | 7.8 | 10.0 | 12.4 | 8.3 | 10.3 | 9.2 | 8.8 |
| | | N | 4 | 4 | 4 | 4 | 4 | 4 | 4 | 4 |

TABLE 15
Sequences for Non-Human Primate Study

| | Target | SEQ | | SEQ | | SEQ | | SEQ | |
|---|---|---|---|---|---|---|---|---|---|
| Duplex | Posi- | ID | | ID | Guide Base Sequence | ID | Passenger Structure Code | ID | Passenger Base |
| ID | tion | No | Guide Structure (5′-3′) | No | (5′-3′) | No | (5′-3′) | No | Sequence (5′-3′) |
| SRS- | 1269 | 1044 | usAfsuugcUfcaauUfuUfuGfcag | 809 | UAUUGCUCAAUUUUUGCAGGUUC | 1070 | ascscugcAfaAfaAfuugagcaaua | 937 | ACCUGCAAAAAUUGAGCAAUA |
| 001711 | | | gususc | | | | | | |
| SRS- | 1800 | 1048 | usGfsucggUfuggaAfuUfcUfuuu | 165 | UGUCGGUUGGAAUUCUUUUUGGA | 1074 | csasaaaaGfaAfuUfccaaccgaca | 549 | CAAAAAGAAUUCCAACCGACA |
| 001715 | | | ugsgsa | | | | | | |
| SRS- | 1652 | 345 | usAfsgaccAfaggaGfaAfaCfggc | 153 | UAGACCAAGGAGAAACGGCUGCU | 729 | csasgccgUfuUfcUfccuuggucua | 537 | CAGCCGUUUCUCCUUGGUCUA |
| 001849 | | | ugscsu | | | | | | |
| SRS- | 1800 | 2261 | usGfsucgGf(T-T) | 2249 | UGUCGGTUGGAAUUCUUUUUGGA | 1074 | csasaaaaGfaAfuUfccaaccgaca | 549 | CAAAAAGAAUUCCAACCGACA |
| 002371 | | | uggaAfuUfcUfuuuugsgsa | | | | | | |
| SRS- | 1800 | 2211 | usGfsucggUf(T-NAc) | 2199 | UGUCGGUGGAAUUCUUUUUGGA | 2233 | csasaaaaGfaAfuUfccgaccgaca | 2222 | CAAAAAGAAUUCCGACCGACA |
| 002511 | | | ggaAfuUfcUfuuuugsgsa | | | | | | |
| SRS- | 1800 | 2302 | usGfsucggUf(T-T) | 2295 | UGUCGGUTGGAAUUCUUUUUGGA | 1074 | csasaaaaGfaAfuUfccaacegaca | 549 | CAAAAAGAAUUCCAACCGACA |
| 002512 | | | ggaAfuUfcUfuuuugsgsa | | | | | | |
| SRS- | 1800 | 2303 | usGfsucgGf(T-NAc) | 2199 | UGUCGGUGGAAUUCUUUUUGGA | 2232 | csasaaaaGfaAfuUfccagccgaca | 2221 | CAAAAAGAAUUCCAGCCGACA |
| 002513 | | | uggaAfuUfcUfuuuugsgsa | | | | | | |

Note:
the target position is relative to human transcript NM_001384479.1; the corresponding sequence of a certain SEQ ID NO. is located on its right column of the same row. “A” refers to adenosine-3′-phosphate; “a” refers to 2′-O-methyladenosine-3′-phosphate; “Af” refers to 2′-fluoroadenosine-3′-phosphate; “dA” refers to 2′-deoxyadenosine-3-phosphate; “al” refers to 2-Amino-2′-O-methyladenosine-3′-phosphate; “C” refers to cytidine-3′-phosphate; “c” refers to 2′-O-methylcytidine-3′-phosphate; “Cf” refers to 2′-fluorocytidine-3′-phosphate; “dC” refers to 2′-deoxycytidine-3′-phosphate; “G” refers to guanosine-3′-phosphate; “g” refers to 2′-O-methylguanosine-3′-phosphate; “Gf” refers to 2′-fluoroguanosine-3′-phosphate; “dG” refers to 2′-deoxyguanosine-3′-phosphate; “U” refers to uridine-3′-phosphate; “u” refers to 2′-O-methyluridine-3′-phosphate; “Uf” refers to 2′-fluorouridine-3′-phosphate; “u3” refers to 2′-O-methyl-2-thiouridine-3′-phosphate; “U3f” refers to 2′-fluoro-2-thiouridine-3′-phosphate; “T” refers to 5-methyluridine-3′-phosphate; “t” refers to 2′-O-methyl-5-methyluridine-3′-phosphate; “Tf” refers to 2′-fluoro-5-methyluridine-3′-phosphate; “dT” refers to 2′-deoxythymidine-3′-phosphate; “s” refers to 3′-phosphorothioate; “(T-T)” refers to acyclic L-threoninol nucleic acid-thymine-3′-phosphate; “(T-A)” refers to acyclic L-threoninol nucleic acid-adenine-3′-phosphate; “(T-NAc)″ refers to acyclic N-acetyl L-threoninol abasic nucleic acid-3′phosphate; “(dAB)” refers to 1′,2′-Dideoxyribose-3′phosphate; “(Tgn)″ refers to thymidine-glycol nucleic acid (GNA) S-isomer; Each modified passenger sequence is coupled to a targeting moiety (e.g., GalNAc or galactose) at its 3′ end via a linker (e.g., Formula V′, V′′′′,
V′′′′′, or V′′′′′′).

TABLE 16
Percent Change in Serum AGT Relative to Day 1 Pre-Dose

| | | | Study Day | | | | | |
|---|---|---|---|---|---|---|---|---|
| SRS ID | Dose | Statistic | 1 | 8 | 15 | 22 | 29 | 36 |
| SRS- | 2 mg/kg | Mean | 0.0 | −58.6 | −76.6 | −77.0 | −83.5 | −83.2 |
| 001711 | | SD | 0.0 | 7.5 | 1.2 | 4.1 | 3.2 | 3.6 |
| | | N | 4 | 4 | 4 | 4 | 4 | 4 |
| | 2 mg/kg | Mean | 0.0 | −40.5 | −56.8 | −59.7 | −67.9 | −68.8 |
| SRS- | | SD | 0.0 | 7.7 | 10.6 | 8.6 | 10.5 | 9.0 |
| 001715 | | N | 4 | 4 | 4 | 4 | 4 | 4 |
| SRS- | 2 mg/kg | Mean | 0.0 | −60.3 | −76.9 | −80.4 | −84.9 | −83.1 |
| 001849 | | SD | 0.0 | 6.9 | 5.3 | 7.5 | 4.5 | 7.2 |
| | | N | 4 | 4 | 4 | 4 | 4 | 4 |
| SRS- | 2 mg/kg | Mean | 0.0 | −52.1 | −61.9 | −73.6 | −74.6 | −76.3 |
| 002371 | | SD | 0.0 | 13.5 | 19.9 | 12.9 | 14.6 | 13.2 |
| | | N | 4 | 4 | 4 | 4 | 4 | 4 |
| SRS- | 2 mg/kg | Mean | 0.0 | −44.8 | −49.7 | −60.4 | −62.7 | −65.9 |
| 002511 | | SD | 0.0 | 12.9 | 24.6 | 18.2 | 23.3 | 18.2 |
| | | N | 4 | 4 | 4 | 4 | 4 | 4 |
| SRS- | 2 mg/kg | Mean | 0.0 | −46.4 | −64.0 | −63.6 | −74.0 | −73.2 |
| 002512 | | SD | 0.0 | 8.7 | 6.8 | 17.3 | 7.0 | 7.1 |
| | | N | 4 | 4 | 4 | 4 | 4 | 4 |
| SRS- | 2 mg/kg | Mean | 0.0 | −41.5 | −60.4 | −70.0 | −73.3 | −72.3 |
| 002513 | | SD | 0.0 | 11.7 | 20.3 | 5.7 | 10.6 | 15.5 |
| | | N | 4 | 4 | 4 | 4 | 4 | 4 |

What is claimed is:

1. A polynucleic acid molecule for modulating expression of angiotensinogen (AGT) gene, wherein the polynucleic acid molecule comprises a nucleic acid sequence in Table 1, Table 3, Table 5, Table 7, Table 9, Table 11, Table 13, or Table 15.

2. The polynucleic acid molecule of claim 1, wherein the polynucleic acid molecule is a single-stranded nucleic acid molecule.

3. The polynucleic acid molecule of any one of claims 1-2, wherein the polynucleic acid molecule is 16-30 base pairs in length.

4. The polynucleic acid molecule of any one of claims 1-3, wherein the polynucleic acid molecule is 19-25, or 21-23 base pairs in length.

5. The polynucleic acid molecule of claim 1, wherein the polynucleic acid molecule is a double-stranded nucleic acid molecule comprising a passenger strand and a guide strand.

6. The polynucleic acid molecule of claim 5, wherein the passenger strand comprises at least 85%, at least 90%, at least 95% identical to a nucleic acid sequence selected from SEQ ID NOs: 385-576, 897-960, and 1051-1063.

7. The polynucleic acid molecule of claim 5, wherein the guide strand comprises at least 85%, at least 90%, at least 95% identical to a nucleic acid sequence selected from SEQ ID NOs: 1-192, 769-832, and 1025-1037.

8. The polynucleic acid molecule of any one of claims 5-7, wherein the passenger strand comprises a nucleic acid sequence comprising at least 16, 17, 18, 19, or 20 consecutive nucleotides of a nucleic acid sequence selected from SEQ ID NOs: 385-576, 897-960, and 1051-1063, with no more than 1, 2, 3, or 4 mismatches.

9. The polynucleic acid molecule of any one of claims 5-8, wherein the guide strand comprises a nucleic acid sequence comprising at least 16, 17, 18, 19, or 20 consecutive nucleotides of a nucleic acid sequence selected from SEQ ID NOs: 1-192, 769-832, and 1025-1037, with no more than 1, 2, 3, or 4 mismatches.

10. The polynucleic acid molecule of any one of claims 5-9, wherein the passenger strand comprises one of SEQ ID NOs: 385-576, 897-960, and 1051-1063, and the guide strand comprises one of SEQ ID NOs: 1-192, 769-832, and 1025-1037.

11. The polynucleic acid molecule of any one of claims 5-10, wherein the passenger strand comprises a nucleic acid sequence selected from SEQ ID NOs: 1051-1063 and the guide strand comprises a nucleic acid sequence selected from SEQ ID NOs: 1025-1037.

12. The polynucleic acid molecule of any one of claims 1-11, wherein the polynucleic acid molecule comprises (1) a 2′-fluoro modified nucleotides; (2) a 2′-O-methyl modified nucleotides; or (3) a modified internucleotide linkage.

13. The polynucleic acid molecule of any one of claims 1-12, wherein the polynucleic acid molecule comprises at least two consecutive modified internucleotide linkages at the 5′ end.

14. The polynucleic acid molecule of any one of claims 1-13, wherein the polynucleic acid molecule comprises at least two internucleotide linkages among three internucleotide linkages at the 3′end substituted with modified internucleotide linkages.

15. The polynucleic acid molecule of any one of claims 5-14, wherein the passenger strand comprises ‘5-nsnsnnnnNfnNfnNfnnnnnnnnnn-3’, wherein the guide strand comprises ‘5-nsNfsnnnnNfnnnnNfnNfnNfnnnnnsnsn-3’, wherein “Nf” stands for a 2′-fluoro modified nucleotide, “n” stands for a 2′-O-methyl modified nucleotide, “s” stands for a 3′-phosphorothioate.

16. The polynucleic acid molecule of any one of claims 5-14, wherein the passenger strand comprises ‘5-nsnsnnnnNfnNfNfNfnnnnnnnnnn-3’, wherein the guide strand comprises ‘5-nsNfsnnnNfnNfNfnnnnNfnNfnnnnnsnsn-3’, wherein “Nf” stands for a 2′-fluoro modified nucleotide, “n” stands for a 2′-O-methyl modified nucleotide, “s” stands for a 3′-phosphorothioate.

17. The polynucleic acid molecule of any one of claims 5-14, wherein the passenger strand comprises ‘5-nsnsnnnnnnNfnNfnnnnnnnnn-3’, wherein the guide strand comprises ‘5-nsNfsnnnnnnnnnNfnNfnnnnnnnsnsn-3’, wherein “Nf” stands for a 2′-fluoro modified nucleotide, “n” stands for a 2′-O-methyl modified nucleotide, “s” stands for a 3′-phosphorothioate.

18. The polynucleic acid molecule of any one of claims 5-14, wherein the passenger strand comprises ‘5-nsnsnnnnNfnNfnNfnnnnnnnnnn-3’, wherein the guide strand comprises ‘5-nsNfsnnnnnnnnnNfnNfnNfnnnnnsnsn-3’, wherein “Nf” stands for a 2′-fluoro modified nucleotide, “n” stands for a 2′-O-methyl modified nucleotide, “s” stands for a 3′-phosphorothioate.

19. The polynucleic acid molecule of any one of claims 12-18, wherein the modified internucleotide linkage is a phosphorothioate linkage.

20. The polynucleic acid molecule of claim 19, wherein the phosphorothioate linkage is a stereochemically enriched phosphorothioate internucleotide linkage.

21. The polynucleic acid molecule of claim 20, wherein the stereochemically enriched phosphorothioate internucleotide linkage is an S_{P} chiral internucleotide phosphorothioate linkage.

22. The polynucleic acid molecule of one of claims 12-18, wherein the polynucleic acid comprises a plurality of modified internucleotide linkages, and at least 1, 2, 3, or 4 of the plurality of modified internucleotide linkages are stereochemically enriched phosphorothioate internucleotide linkages.

23. The polynucleic acid molecule of claim 22, wherein the stereochemically enriched phosphorothioate internucleotide linkages comprise both R- and S-isomers.

24. The polynucleic acid molecule of one of claims 20-22, wherein the stereochemically enriched phosphorothioate internucleotide linkage(s) is disposed between two consecutive nucleosides that are two of six 5′ or 3′ end nucleosides of the passenger strand or the guide strand.

25. The polynucleic acid molecule of any one of claims 1-24, wherein the polynucleic acid molecule comprises a hypoxanthine nucleobase-containing nucleoside substitution.

26. The polynucleic acid molecule of claim 25, wherein the hypoxanthine nucleobase-containing nucleoside substitution is an inosine substitution.

27. The polynucleic acid molecule of claim 26, wherein the inosine substitution is within a seed region of the guide strand.

28. The polynucleic acid molecule of claim 26, wherein the inosine substitution is within 7 nucleotides from the 5′ end of the guide strand.

29. The polynucleic acid molecule of any one of claims 1-28, wherein the polynucleic acid molecule comprises an abasic substitution.

30. The polynucleic acid molecule of claim 29, wherein the abasic substitution is at the 5^{th} or 7^{th} nucleotide from the 5′ end.

31. The polynucleic acid molecule of any one of claims 12-30, wherein the cytotoxicity of the polynucleic acid molecule is decreased compared to unmodified polynucleic acid.

32. The polynucleic acid molecule of any one of claims 12-31, wherein the passenger strand comprises a nucleic acid sequence that is at least 80%, at least 85%, at least 90%, at least 95% identical to a nucleic acid sequence selected from SEQ ID NOs: 577-768, 961-1024, and 1064-1076.

33. The polynucleic acid molecule of any one of claims 12-31, wherein the passenger strand comprises a nucleic acid sequence comprising at least 15, 16, 17, 18, 19, or 20 consecutive nucleotides of a nucleic acid sequence selected from SEQ ID NOs: 577-768, 961-1024, and 1064-1076, with no more than 1, 2, 3, or 4 mismatches.

34. The polynucleic acid molecule of any one of claims 12-33, wherein the guide strand comprises a nucleic acid sequence that is at least 85%, at least 90%, at least 95% identical to a nucleic acid sequence selected from SEQ ID NOs: 193-384, 833-896, and 1038-1050.

35. The polynucleic acid molecule of any one of claims 12-33, wherein the guide strand comprises a nucleic acid sequence comprising at least 15, 16, 17, 18, 19, or 20 consecutive nucleotides of a nucleic acid sequence selected from SEQ ID NOs: 193-384, 833-896, and 1038-1050 with no more than 1, 2, 3, or 4 mismatches.

36. The polynucleic acid molecule of any one of claims 12-35, wherein the passenger strand comprises a nucleic acid sequence selected from SEQ ID NOs: 577-768, 961-1024, and 1064-1076, and the guide strand comprises a nucleic acid sequence selected from SEQ ID NOs:193-384, 833-896, and 1038-1050.

37. The polynucleic acid molecule of any one of claims 1-36, wherein the guide strand comprises a nucleotide analogue selected from a group consisting of acyclic L-threoninol nucleic acid-thymine-3′-phosphate (T-T), acyclic L-threoninol nucleic acid-adenine-3′-phosphate (T-A), acyclic N-acetyl L-threoninol abasic nucleic acid-3′phosphate (T-NAc), 1′,2′-Dideoxyribose-3′phosphate (dAB), and thymidine-glycol nucleic acid (GNA) S-isomer (Tgn).

38. The polynucleic acid molecule of claim 37, wherein the nucleotide analogue is located at the seed region of the guide strand (positions 2-8) from the 5′ end.

39. The polynucleic acid molecule of claim 37, wherein the nucleotide analogue is located at any one of positions 4-8, positions 5-8, or positions 6-8 from the 5′ end of the guide strand.

40. The polynucleic acid molecule of claim 37, wherein the guide strand comprises a nucleic acid sequence selected from Table 9, Table 11, Table 13 or Table 15.

41. The polynucleic acid molecule of claim 40, wherein the passenger guide strand comprises a nucleic acid sequence selected from Table 9, Table 11, Table 13 or Table 15.

42. A polynucleic acid molecule for modulating expression of angiotensinogen (AGT) gene, wherein polynucleic acid molecule comprises:
(a) a guide strand comprising the nucleotide sequence of usAfsugccAfuauaUfaCfgGfaagccscsa (SEQ ID NO: 1038) and a passenger strand comprising the nucleotide sequence of gsgscuucCfgUfaUfauauggcaua (SEQ ID NO: 1064);
(b) a guide strand comprising the nucleotide sequence of usUfsgaacCfugucAfaUfcUfucucasgsc (SEQ ID NO: 1039) and a passenger strand comprising the nucleotide sequence of usgsagaaGfaUfuGfacagguucaa (SEQ ID NO: 1065);
(c) a guide strand comprising the nucleotide sequence of usAfsugaaCfcuguCfaAfuCfuucucsasg (SEQ ID NO: 1040) and a passenger strand comprising the nucleotide sequence of gsasgaagAfuUfgAfcagguucaua (SEQ ID NO: 1066);
(d) a guide strand comprising the nucleotide sequence of usUfsugagGfgaguUfuUfgCfuggaasasg (SEQ ID NO: 1041) and a passenger strand comprising the nucleotide sequence of ususccagCfaAfaAfcucccucaaa (SEQ ID NO: 1067);
(e) a guide strand comprising the nucleotide sequence of usGfsuuucUfucauCfcAfgUfugaggsgsa (SEQ ID NO: 1042) and a passenger strand comprising the nucleotide sequence of cscsucaaCfuGfgAfugaagaaaca (SEQ ID NO: 1068);
(f) a guide strand comprising the nucleotide sequence of usAfsuuuuUfgcagGfuUfcAfgcucgsgsu (SEQ ID NO: 1043) and a passenger strand comprising the nucleotide sequence of csgsagcuGfaAfcCfugcaaaaaua (SEQ ID NO: 1069);
(g) a guide strand comprising the nucleotide sequence of usAfsuugcUfcaauUfuUfuGfcaggususc (SEQ ID NO: 1044) and a passenger strand comprising the nucleotide sequence of ascscugcAfaAfaAfuugagcaaua (SEQ ID NO: 1070);
(h) a guide strand comprising the nucleotide sequence of usUfsacacAfgcaaAfcAfgGfaauggsgsc (SEQ ID NO: 1045) and a passenger strand comprising the nucleotide sequence of cscsauucCfuGfuUfugcuguguaa (SEQ ID NO: 1071);
(i) a guide strand comprising the nucleotide sequence of usUfsugauCfauacAfcAfgCfaaacasgsg (SEQ ID NO:1046) and a passenger strand comprising the nucleotide sequence of usgsuuugCfuGfuGfuaugaucaaa (SEQ ID NO: 1072);
(j) a guide strand comprising the nucleotide sequence of usAfsaacaCfugguUfcUfuGfccuccscsc (SEQ ID NO: 1047) and a passenger strand comprising the nucleotide sequence of gsgsaggcAfaGfaAfccaguguuua (SEQ ID NO: 1073);
(k) a guide strand comprising the nucleotide sequence of usGfsucggUfuggaAfuUfcUfuuuugsgsa (SEQ ID NO: 1048) and a passenger strand comprising the nucleotide sequence of csasaaaaGfaAfuUfccaaccgaca (SEQ ID NO: 1074);
(l) a guide strand comprising the nucleotide sequence of usUfsuucaCfaaacAfaGfcUfggucgsgsu (SEQ ID NO: 1049) and a passenger strand comprising the nucleotide sequence of csgsaccaGfcUfuGfuuugugaaaa (SEQ ID NO: 1075);
(m) a guide strand comprising the nucleotide sequence of usGfsuuucAfcaaaCfaAfgCfuggucsgsg (SEQ ID NO: 1050) and a passenger strand comprising the nucleotide sequence of gsasccagCfuUfgUfuugugaaaca (SEQ ID NO: 1076);
(n) a guide strand comprising the nucleotide sequence of usAfsgaccAfaggaGfaAfaCfggcugscsu (SEQ ID NO: 345) and a passenger strand comprising the nucleotide sequence of csasgccgUfuUfcUfccuuggucua (SEQ ID NO: 729);
(o) a guide strand comprising the nucleotide sequence of usGfsucgGf(T-T)uggaAfuUfcUfuuuugsgsa (SEQ ID NO: 2261) and a passenger strand comprising the nucleotide sequence of csasaaaaGfaAfuUfccaaccgaca (SEQ ID NO: 1074);
(p) a guide strand comprising the nucleotide sequence of usGfsucggUf(T-NAc)ggaAfuUfcUfuuuugsgsa (SEQ ID NO: 2211) and a passenger strand comprising the nucleotide sequence of csasaaaaGfaAfuUfccgaccgaca (SEQ ID NO: 2233);
(q) a guide strand comprising the nucleotide sequence of usGfsucggUf(T-T)ggaAfuUfcUfuuuugsgsa (SEQ ID NO: 2302) and a passenger strand comprising the nucleotide sequence of csasaaaaGfaAfuUfccaaccgaca (SEQ ID NO: 1074); or
(r) a guide strand comprising the nucleotide sequence of usGfsucgGf(T-NAc)uggaAfuUfcUfuuuugsgsa (SEQ ID NO: 2303) and a passenger strand comprising the nucleotide sequence of csasaaaaGfaAfuUfccagccgaca (SEQ ID NO: 2232),
wherein smaller case “n” stands for 2′-O-methyl modified nucleotide, upper case followed with an “f” (i.e., “Nf”) stands for 2′-fluoro modified nucleotide, “(T-NAc)” stands for acyclic N-acetyl L-threoninol abasic nucleic acid-3′-phosphate, “(T-T)” stands for acyclic L-threoninol nucleic acid-thymine-3′-phosphate, and “s” stands for 3′-phosphorothioate.

43. A polynucleic acid molecule conjugate for modulating expression of angiotensinogen (AGT) gene, wherein the polynucleic acid molecule conjugate comprises a polynucleic acid molecule of any one of claims 1-42 and an asialoglycoprotein receptor targeting moiety.

44. The polynucleic acid molecule conjugate of claim 43, wherein the polynucleic acid molecule and the asialoglycoprotein receptor targeting moiety is coupled via a linker.

45. The polynucleic acid molecule conjugate of claim 43, wherein the linker comprises formula (IV) below, [chemical structure]
wherein at least one of Y1 and Y2 is a nucleotide in the polynucleic acid molecule.

46. The polynucleic acid molecule conjugate of claim 45, wherein the Y1 is the last nucleotide on the 3′ end of the passenger strand of the polynucleic acid molecule.

47. The polynucleic acid molecule conjugate of claim 45, wherein the Y1 and Y2 are two consecutive nucleotides in the polynucleic acid molecule.

48. The polynucleic acid molecule conjugate of any one of claims 43-47, wherein the asialoglycoprotein receptor targeting moiety comprises N-Acetylgalactosamine (GalNAc).

49. The polynucleic acid molecule conjugate of any one of claims 44-48, wherein the linker and the asialoglycoprotein receptor targeting moiety with the last nucleotide on the 3′ end of the passenger strand of the polynucleic acid molecule are shown in: [chemical structure] [chemical structure]
wherein Z in formula (V′), (V″″), (V′″″), or (V″″″) is —H, —OH, —O-Methyl, —F, or —O— methoxyethyl, and R in formula (V′), (V″″), (V′″″), or (V″″″) is adenine, uracil, guanine, cytosine, thymine, abasic, or others.

50. A pharmaceutical composition comprising a polynucleic acid molecule of any one of claims 1-42 or a polynucleic acid molecule conjugate of any one of claims 43-49, and a pharmaceutically acceptable excipient.

51. The pharmaceutical composition of claim 50, wherein the pharmaceutical composition is formulated as a nanoparticle formulation.

52. The pharmaceutical composition of claim 50 or claim 51, wherein the pharmaceutical composition is formulated for parenteral, oral, intranasal, buccal, rectal, transdermal, intravenous, subcutaneous, or intrathecal administration.

53. A method of modulating expression of angiotensinogen (AGT) gene in a subject, comprising: administering to the subject a polynucleic acid molecule of any one of claims 1-42, a polynucleic acid molecule conjugate of any one of claims 43-49, or a pharmaceutical composition of claims 50-52, thereby modulating the expression of AGT gene in the subject.

54. A method of preventing, alleviating, or treating hypertension in a subject in need thereof, comprising: administering to the subject a polynucleic acid molecule of any one of claims 1-42, a polynucleic acid molecule conjugate of any one of claims 43-49, or a pharmaceutical composition of claims 50-52, wherein the polynucleic acid molecule of any one of claims 1-42, the polynucleic acid molecule conjugate of any one of claims 43-49, or the pharmaceutical composition of claims 50-52 reduces the expression of AGT gene in the subject.

55. A method of preventing, alleviating, or treating atherosclerosis in a subject in need thereof, comprising: administering to the subject a polynucleic acid molecule of any one of claims 1-42, a polynucleic acid molecule conjugate of any one of claims 43-49, or a pharmaceutical composition of claims 50-52, wherein the polynucleic acid molecule of any one of claims 1-42, the polynucleic acid molecule conjugate of any one of claims 43-49, or the pharmaceutical composition of claims 50-52 reduces the expression of AGT gene in the subject.

56. The method of claim 55, wherein the subject suffers from a coronary artery disease.

57. A method of preventing, alleviating, or treating obesity in a subject in need thereof, comprising: administering to the subject a polynucleic acid molecule of any one of claims 1-42, a polynucleic acid molecule conjugate of any one of claims 43-49, or a pharmaceutical composition of claims 50-52, wherein the polynucleic acid molecule of any one of claims 1-42, the polynucleic acid molecule conjugate of any one of claims 43-49, or the pharmaceutical composition of claims 50-52 reduces the expression of AGT gene in the subject.

The application's sequence listing, which the Patent Office published only in electronic form, follows.

SEQUENCE LISTING (2333 sequences)

SEQ ID NO: 1 - RNA, 23 nt, synthetic construct
  source 1..23: mol_type = other RNA
ttgctcgcttccgcatacccttc

SEQ ID NO: 2 - RNA, 23 nt, synthetic construct
  source 1..23: mol_type = other RNA
tgtgctcgcttccgcataccctt

SEQ ID NO: 3 - RNA, 23 nt, synthetic construct
  source 1..23: mol_type = other RNA
tgggtgctcgcttccgcataccc

SEQ ID NO: 4 - RNA, 23 nt, synthetic construct
  source 1..23: mol_type = other RNA
ttggggtgctcgcttccgcatac

SEQ ID NO: 5 - RNA, 23 nt, synthetic construct
  source 1..23: mol_type = other RNA
tacaccggcaggagccatctcag

SEQ ID NO: 6 - RNA, 23 nt, synthetic construct
  source 1..23: mol_type = other RNA
ttatgtacacccggtcacctgca

SEQ ID NO: 7 - RNA, 23 nt, synthetic construct
  source 1..23: mol_type = other RNA
tgggtgtatgtacacccggtcac

SEQ ID NO: 8 - RNA, 23 nt, synthetic construct
  source 1..23: mol_type = other RNA
taggggtgtatgtacacccggtc

SEQ ID NO: 9 - RNA, 23 nt, synthetic construct
  source 1..23: mol_type = other RNA
taaggggtgtatgtacacccggt

SEQ ID NO: 10 - RNA, 23 nt, synthetic construct
  source 1..23: mol_type = other RNA
tgaaggggtgtatgtacacccgg

SEQ ID NO: 11 - RNA, 23 nt, synthetic construct
  source 1..23: mol_type = other RNA
tggtggaaggggtgtatgtacac

SEQ ID NO: 12 - RNA, 23 nt, synthetic construct
  source 1..23: mol_type = other RNA
taggtggaaggggtgtatgtaca

SEQ ID NO: 13 - RNA, 23 nt, synthetic construct
  source 1..23: mol_type = other RNA
tctctcattgtggatgacgaggt

SEQ ID NO: 14 - RNA, 23 nt, synthetic construct
  source 1..23: mol_type = other RNA
tgtactctcattgtggatgacga

SEQ ID NO: 15 - RNA, 23 nt, synthetic construct
  source 1..23: mol_type = other RNA
tggtactctcattgtggatgacg

SEQ ID NO: 16 - RNA, 23 nt, synthetic construct
  source 1..23: mol_type = other RNA
taggtactctcattgtggatgac

SEQ ID NO: 17 - RNA, 23 nt, synthetic construct
  source 1..23: mol_type = other RNA
tcaggtactctcattgtggatga

SEQ ID NO: 18 - RNA, 23 nt, synthetic construct
  source 1..23: mol_type = other RNA
tcacaggtactctcattgtggat

SEQ ID NO: 19 - RNA, 23 nt, synthetic construct
  source 1..23: mol_type = other RNA
tgctgctcacaggtactctcatt

SEQ ID NO: 20 - RNA, 23 nt, synthetic construct
  source 1..23: mol_type = other RNA
tccggcattggcctttgccagct

SEQ ID NO: 21 - RNA, 23 nt, synthetic construct
  source 1..23: mol_type = other RNA
tttcccggcattggcctttgcca

SEQ ID NO: 22 - RNA, 23 nt, synthetic construct
  source 1..23: mol_type = other RNA
tggggatgtcttggcctgaattg

SEQ ID NO: 23 - RNA, 23 nt, synthetic construct
  source 1..23: mol_type = other RNA
taggggatgtcttggcctgaatt

SEQ ID NO: 24 - RNA, 23 nt, synthetic construct
  source 1..23: mol_type = other RNA
tctgtagggccttttcatccaca

SEQ ID NO: 25 - RNA, 23 nt, synthetic construct
  source 1..23: mol_type = other RNA
tgcagcgactagcaccagctggt

SEQ ID NO: 26 - RNA, 23 nt, synthetic construct
  source 1..23: mol_type = other RNA
tgtcaagttttgcagcgactagc

SEQ ID NO: 27 - RNA, 23 nt, synthetic construct
  source 1..23: mol_type = other RNA
tcggtgtcaagttttgcagcgac

SEQ ID NO: 28 - RNA, 23 nt, synthetic construct
  source 1..23: mol_type = other RNA
ttcggtgtcaagttttgcagcga

SEQ ID NO: 29 - RNA, 23 nt, synthetic construct
  source 1..23: mol_type = other RNA
taacttgtcttcggtgtcaagtt

SEQ ID NO: 30 - RNA, 23 nt, synthetic construct
  source 1..23: mol_type = other RNA
tcaacttgtcttcggtgtcaagt

SEQ ID NO: 31 - RNA, 23 nt, synthetic construct
  source 1..23: mol_type = other RNA
ttcaacttgtcttcggtgtcaag

SEQ ID NO: 32 - RNA, 23 nt, synthetic construct
  source 1..23: mol_type = other RNA
tctcaacttgtcttcggtgtcaa

SEQ ID NO: 33 - RNA, 23 nt, synthetic construct
  source 1..23: mol_type = other RNA
ttgcggccctcaacttgtcttcg

SEQ ID NO: 34 - RNA, 23 nt, synthetic construct
  source 1..23: mol_type = other RNA
tttgcggccctcaacttgtcttc

SEQ ID NO: 35 - RNA, 23 nt, synthetic construct
  source 1..23: mol_type = other RNA
tatcccgaccattgcggccctca

SEQ ID NO: 36 - RNA, 23 nt, synthetic construct
  source 1..23: mol_type = other RNA
tagcatcccgaccattgcggccc

SEQ ID NO: 37 - RNA, 23 nt, synthetic construct
  source 1..23: mol_type = other RNA
ttggccagcatcccgaccattgc

SEQ ID NO: 38 - RNA, 23 nt, synthetic construct
  source 1..23: mol_type = other RNA
tttggccagcatcccgaccattg

SEQ ID NO: 39 - RNA, 23 nt, synthetic construct
  source 1..23: mol_type = other RNA
tacggaagcccaagaagttggcc

SEQ ID NO: 40 - RNA, 23 nt, synthetic construct
  source 1..23: mol_type = other RNA
ttacggaagcccaagaagttggc

SEQ ID NO: 41 - RNA, 23 nt, synthetic construct
  source 1..23: mol_type = other RNA
tatacggaagcccaagaagttgg

SEQ ID NO: 42 - RNA, 23 nt, synthetic construct
  source 1..23: mol_type = other RNA
tatatacggaagcccaagaagtt

SEQ ID NO: 43 - RNA, 23 nt, synthetic construct
  source 1..23: mol_type = other RNA
ttatatacggaagcccaagaagt

SEQ ID NO: 44 - RNA, 23 nt, synthetic construct
  source 1..23: mol_type = other RNA
tatatatacggaagcccaagaag

SEQ ID NO: 45 - RNA, 23 nt, synthetic construct
  source 1..23: mol_type = other RNA
tcatatatacggaagcccaagaa

SEQ ID NO: 46 - RNA, 23 nt, synthetic construct
  source 1..23: mol_type = other RNA
tccatatatacggaagcccaaga

SEQ ID NO: 47 - RNA, 23 nt, synthetic construct
  source 1..23: mol_type = other RNA
ttgccatatatacggaagcccaa

SEQ ID NO: 48 - RNA, 23 nt, synthetic construct
  source 1..23: mol_type = other RNA
tatgccatatatacggaagccca

SEQ ID NO: 49 - RNA, 23 nt, synthetic construct
  source 1..23: mol_type = other RNA
tgcatgccatatatacggaagcc

SEQ ID NO: 50 - RNA, 23 nt, synthetic construct
  source 1..23: mol_type = other RNA
ttgcatgccatatatacggaagc

SEQ ID NO: 51 - RNA, 23 nt, synthetic construct
  source 1..23: mol_type = other RNA
tgtgcatgccatatatacggaag

SEQ ID NO: 52 - RNA, 23 nt, synthetic construct
  source 1..23: mol_type = other RNA
tactgtgcatgccatatatacgg

SEQ ID NO: 53 - RNA, 23 nt, synthetic construct
  source 1..23: mol_type = other RNA
tgctcactgtgcatgccatatat

SEQ ID NO: 54 - RNA, 23 nt, synthetic construct
  source 1..23: mol_type = other RNA
ttagctcactgtgcatgccatat

SEQ ID NO: 55 - RNA, 23 nt, synthetic construct
  source 1..23: mol_type = other RNA
tatagctcactgtgcatgccata

SEQ ID NO: 56 - RNA, 23 nt, synthetic construct
  source 1..23: mol_type = other RNA
tacgccccatagctcactgtgca

SEQ ID NO: 57 - RNA, 23 nt, synthetic construct
  source 1..23: mol_type = other RNA
tcacgccccatagctcactgtgc

SEQ ID NO: 58 - RNA, 23 nt, synthetic construct
  source 1..23: mol_type = other RNA
tccacgccccatagctcactgtg

SEQ ID NO: 59 - RNA, 23 nt, synthetic construct
  source 1..23: mol_type = other RNA
tgaccacgccccatagctcactg

SEQ ID NO: 60 - RNA, 23 nt, synthetic construct
  source 1..23: mol_type = other RNA
tggaccacgccccatagctcact

SEQ ID NO: 61 - RNA, 23 nt, synthetic construct
  source 1..23: mol_type = other RNA
ttggaccacgccccatagctcac

SEQ ID NO: 62 - RNA, 23 nt, synthetic construct
  source 1..23: mol_type = other RNA
tccatggaccacgccccatagct

SEQ ID NO: 63 - RNA, 23 nt, synthetic construct
  source 1..23: mol_type = other RNA
tcggtggccccatggaccacgcc

SEQ ID NO: 64 - RNA, 23 nt, synthetic construct
  source 1..23: mol_type = other RNA
tgccaaagacagccgttggggag

SEQ ID NO: 65 - RNA, 23 nt, synthetic construct
  source 1..23: mol_type = other RNA
tggtgccaaagacagccgttggg

SEQ ID NO: 66 - RNA, 23 nt, synthetic construct
  source 1..23: mol_type = other RNA
tgggtgccaaagacagccgttgg

SEQ ID NO: 67 - RNA, 23 nt, synthetic construct
  source 1..23: mol_type = other RNA
ttagcctgtcagctgtgtggtcc

SEQ ID NO: 68 - RNA, 23 nt, synthetic construct
  source 1..23: mol_type = other RNA
tgtagcctgtcagctgtgtggtc

SEQ ID NO: 69 - RNA, 23 nt, synthetic construct
  source 1..23: mol_type = other RNA
ttgtagcctgtcagctgtgtggt

SEQ ID NO: 70 - RNA, 23 nt, synthetic construct
  source 1..23: mol_type = other RNA
tgattgcctgtagcctgtcagct

SEQ ID NO: 71 - RNA, 23 nt, synthetic construct
  source 1..23: mol_type = other RNA
tcgggaggtgcagttcttgtcct

SEQ ID NO: 72 - RNA, 23 nt, synthetic construct
  source 1..23: mol_type = other RNA
tgcgcatccagccgggaggtgca

SEQ ID NO: 73 - RNA, 23 nt, synthetic construct
  source 1..23: mol_type = other RNA
tttgtgcgcatccagccgggagg

SEQ ID NO: 74 - RNA, 23 nt, synthetic construct
  source 1..23: mol_type = other RNA
tcttgtgcgcatccagccgggag

SEQ ID NO: 75 - RNA, 23 nt, synthetic construct
  source 1..23: mol_type = other RNA
tggaccttgtgcgcatccagccg

SEQ ID NO: 76 - RNA, 23 nt, synthetic construct
  source 1..23: mol_type = other RNA
taggaccttgtgcgcatccagcc

SEQ ID NO: 77 - RNA, 23 nt, synthetic construct
  source 1..23: mol_type = other RNA
tgcagacaggaccttgtgcgcat

SEQ ID NO: 78 - RNA, 23 nt, synthetic construct
  source 1..23: mol_type = other RNA
taggccctgcacaaacggctgct

SEQ ID NO: 79 - RNA, 23 nt, synthetic construct
  source 1..23: mol_type = other RNA
ttatagagagccaggccctgcac

SEQ ID NO: 80 - RNA, 23 nt, synthetic construct
  source 1..23: mol_type = other RNA
tacaggggtatagagagccaggc

SEQ ID NO: 81 - RNA, 23 nt, synthetic construct
  source 1..23: mol_type = other RNA
tccacaggggtatagagagccag

SEQ ID NO: 82 - RNA, 23 nt, synthetic construct
  source 1..23: mol_type = other RNA
tgaccacaggggtatagagagcc

SEQ ID NO: 83 - RNA, 23 nt, synthetic construct
  source 1..23: mol_type = other RNA
tggaccacaggggtatagagagc

SEQ ID NO: 84 - RNA, 23 nt, synthetic construct
  source 1..23: mol_type = other RNA
tgaggaccacaggggtatagaga

SEQ ID NO: 85 - RNA, 23 nt, synthetic construct
  source 1..23: mol_type = other RNA
tagagcgtgggaggaccacaggg

SEQ ID NO: 86 - RNA, 23 nt, synthetic construct
  source 1..23: mol_type = other RNA
tgtgaagtccagagagcgtggga

SEQ ID NO: 87 - RNA, 23 nt, synthetic construct
  source 1..23: mol_type = other RNA
tgttctgtgaagtccagagagcg

SEQ ID NO: 88 - RNA, 23 nt, synthetic construct
  source 1..23: mol_type = other RNA
ttgaacctgtcaatcttctcagc

SEQ ID NO: 89 - RNA, 23 nt, synthetic construct
  source 1..23: mol_type = other RNA
tacagcctgcatgaacctgtcaa

SEQ ID NO: 90 - RNA, 23 nt, synthetic construct
  source 1..23: mol_type = other RNA
tttgaaagccagggtgctgtcca

SEQ ID NO: 91 - RNA, 23 nt, synthetic construct
  source 1..23: mol_type = other RNA
ttaggtgttgaaagccagggtgc

SEQ ID NO: 92 - RNA, 23 nt, synthetic construct
  source 1..23: mol_type = other RNA
tgacgtaggtgttgaaagccagg

SEQ ID NO: 93 - RNA, 23 nt, synthetic construct
  source 1..23: mol_type = other RNA
tggacgtaggtgttgaaagccag

SEQ ID NO: 94 - RNA, 23 nt, synthetic construct
  source 1..23: mol_type = other RNA
ttggacgtaggtgttgaaagcca

SEQ ID NO: 95 - RNA, 23 nt, synthetic construct
  source 1..23: mol_type = other RNA
tagtggacgtaggtgttgaaagc

SEQ ID NO: 96 - RNA, 23 nt, synthetic construct
  source 1..23: mol_type = other RNA
tgaagtggacgtaggtgttgaaa

SEQ ID NO: 97 - RNA, 23 nt, synthetic construct
  source 1..23: mol_type = other RNA
tggaagtggacgtaggtgttgaa

SEQ ID NO: 98 - RNA, 23 nt, synthetic construct
  source 1..23: mol_type = other RNA
ttggaagtggacgtaggtgttga

SEQ ID NO: 99 - RNA, 23 nt, synthetic construct
  source 1..23: mol_type = other RNA
tttcccttggaagtggacgtagg

SEQ ID NO: 100 - RNA, 23 nt, synthetic construct
  source 1..23: mol_type = other RNA
tgtgctgttgtccacccagaact

SEQ ID NO: 101 - RNA, 23 nt, synthetic construct
  source 1..23: mol_type = other RNA
tttgagtcaccgagaagttgtcc

SEQ ID NO: 102 - RNA, 23 nt, synthetic construct
  source 1..23: mol_type = other RNA
tcttgagtcaccgagaagttgtc

SEQ ID NO: 103 - RNA, 23 nt, synthetic construct
  source 1..23: mol_type = other RNA
tacttgagtcaccgagaagttgt

SEQ ID NO: 104 - RNA, 23 nt, synthetic construct
  source 1..23: mol_type = other RNA
tcacttgagtcaccgagaagttg

SEQ ID NO: 105 - RNA, 23 nt, synthetic construct
  source 1..23: mol_type = other RNA
tgcacttgagtcaccgagaagtt

SEQ ID NO: 106 - RNA, 23 nt, synthetic construct
  source 1..23: mol_type = other RNA
tgggcacttgagtcaccgagaag

SEQ ID NO: 107 - RNA, 23 nt, synthetic construct
  source 1..23: mol_type = other RNA
tagggcacttgagtcaccgagaa

SEQ ID NO: 108 - RNA, 23 nt, synthetic construct
  source 1..23: mol_type = other RNA
tgaagggcacttgagtcaccgag

SEQ ID NO: 109 - RNA, 23 nt, synthetic construct
  source 1..23: mol_type = other RNA
tgcaggcgctctcagtgaagggc

SEQ ID NO: 110 - RNA, 23 nt, synthetic construct
  source 1..23: mol_type = other RNA
tgtgaggctggatcagcagcagg

SEQ ID NO: 111 - RNA, 23 nt, synthetic construct
  source 1..23: mol_type = other RNA
tagttgagggagttttgctggaa

SEQ ID NO: 112 - RNA, 23 nt, synthetic construct
  source 1..23: mol_type = other RNA
tcagttgagggagttttgctgga

SEQ ID NO: 113 - RNA, 23 nt, synthetic construct
  source 1..23: mol_type = other RNA
tccagttgagggagttttgctgg

SEQ ID NO: 114 - RNA, 23 nt, synthetic construct
  source 1..23: mol_type = other RNA
tggcatggtcaggtggatggtcc

SEQ ID NO: 115 - RNA, 23 nt, synthetic construct
  source 1..23: mol_type = other RNA
tcagttggggcatggtcaggtgg

SEQ ID NO: 116 - RNA, 23 nt, synthetic construct
  source 1..23: mol_type = other RNA
ttcggtgtgcagaatggcgggca

SEQ ID NO: 117 - RNA, 23 nt, synthetic construct
  source 1..23: mol_type = other RNA
tttgcaggttcagctcggtgtgc

SEQ ID NO: 118 - RNA, 23 nt, synthetic construct
  source 1..23: mol_type = other RNA
tatttttgcaggttcagctcggt

SEQ ID NO: 119 - RNA, 23 nt, synthetic construct
  source 1..23: mol_type = other RNA
ttcaatttttgcaggttcagctc

SEQ ID NO: 120 - RNA, 23 nt, synthetic construct
  source 1..23: mol_type = other RNA
ttgcggtcattgctcaatttttg

SEQ ID NO: 121 - RNA, 23 nt, synthetic construct
  source 1..23: mol_type = other RNA
ttgggtagactctgtgggctctc

SEQ ID NO: 122 - RNA, 23 nt, synthetic construct
  source 1..23: mol_type = other RNA
tttgggtagactctgtgggctct

SEQ ID NO: 123 - RNA, 23 nt, synthetic construct
  source 1..23: mol_type = other RNA
tgctgttgggtagactctgtggg

SEQ ID NO: 124 - RNA, 23 nt, synthetic construct
  source 1..23: mol_type = other RNA
tgggcggttcagggtcacctcca

SEQ ID NO: 125 - RNA, 23 nt, synthetic construct
  source 1..23: mol_type = other RNA
tatgggcggttcagggtcacctc

SEQ ID NO: 126 - RNA, 23 nt, synthetic construct
  source 1..23: mol_type = other RNA
taatgggcggttcagggtcacct

SEQ ID NO: 127 - RNA, 23 nt, synthetic construct
  source 1..23: mol_type = other RNA
tacaggaatgggcggttcagggt

SEQ ID NO: 128 - RNA, 23 nt, synthetic construct
  source 1..23: mol_type = other RNA
taacaggaatgggcggttcaggg

SEQ ID NO: 129 - RNA, 23 nt, synthetic construct
  source 1..23: mol_type = other RNA
tcaaacaggaatgggcggttcag

SEQ ID NO: 130 - RNA, 23 nt, synthetic construct
  source 1..23: mol_type = other RNA
tgcaaacaggaatgggcggttca

SEQ ID NO: 131 - RNA, 23 nt, synthetic construct
  source 1..23: mol_type = other RNA
tagcaaacaggaatgggcggttc

SEQ ID NO: 132 - RNA, 23 nt, synthetic construct
  source 1..23: mol_type = other RNA
tgatcatacacagcaaacaggaa

SEQ ID NO: 133 - RNA, 23 nt, synthetic construct
  source 1..23: mol_type = other RNA
tcgctttgatcatacacagcaaa

SEQ ID NO: 134 - RNA, 23 nt, synthetic construct
  source 1..23: mol_type = other RNA
tgcgctttgatcatacacagcaa

SEQ ID NO: 135 - RNA, 23 nt, synthetic construct
  source 1..23: mol_type = other RNA
tggcgctttgatcatacacagca

SEQ ID NO: 136 - RNA, 23 nt, synthetic construct
  source 1..23: mol_type = other RNA
tagtggcgctttgatcatacaca

SEQ ID NO: 137 - RNA, 23 nt, synthetic construct
  source 1..23: mol_type = other RNA
tgcagtggcgctttgatcataca

SEQ ID NO: 138 - RNA, 23 nt, synthetic construct
  source 1..23: mol_type = other RNA
tgggcagtggcgctttgatcata

SEQ ID NO: 139 - RNA, 23 nt, synthetic construct
  source 1..23: mol_type = other RNA
tagggcagtggcgctttgatcat

SEQ ID NO: 140 - RNA, 23 nt, synthetic construct
  source 1..23: mol_type = other RNA
tcagggcagtggcgctttgatca

SEQ ID NO: 141 - RNA, 23 nt, synthetic construct
  source 1..23: mol_type = other RNA
tagcgggttggccacgcggccca

SEQ ID NO: 142 - RNA, 23 nt, synthetic construct
  source 1..23: mol_type = other RNA
ttcatgctgtgctcagcgggttg

SEQ ID NO: 143 - RNA, 23 nt, synthetic construct
  source 1..23: mol_type = other RNA
tctggcctttgcctcaaaggcca

SEQ ID NO: 144 - RNA, 23 nt, synthetic construct
  source 1..23: mol_type = other RNA
tgctggcctttgcctcaaaggcc

SEQ ID NO: 145 - RNA, 23 nt, synthetic construct
  source 1..23: mol_type = other RNA
ttgtccggggttgttatctgctg

SEQ ID NO: 146 - RNA, 23 nt, synthetic construct
  source 1..23: mol_type = other RNA
tcgactcattagaagaaaaggtg

SEQ ID NO: 147 - RNA, 23 nt, synthetic construct
  source 1..23: mol_type = other RNA
ttcgactcattagaagaaaaggt

SEQ ID NO: 148 - RNA, 23 nt, synthetic construct
  source 1..23: mol_type = other RNA
tgtcgactcattagaagaaaagg

SEQ ID NO: 149 - RNA, 23 nt, synthetic construct
  source 1..23: mol_type = other RNA
tagtcgactcattagaagaaaag

SEQ ID NO: 150 - RNA, 23 nt, synthetic construct
  source 1..23: mol_type = other RNA
taagtcgactcattagaagaaaa

SEQ ID NO: 151 - RNA, 23 nt, synthetic construct
  source 1..23: mol_type = other RNA
ttcaaagtcgactcattagaaga

SEQ ID NO: 152 - RNA, 23 nt, synthetic construct
  source 1..23: mol_type = other RNA
tacggctgctttccagctcaaag

SEQ ID NO: 153 - RNA, 23 nt, synthetic construct
  source 1..23: mol_type = other RNA
tagaccaaggagaaacggctgct

SEQ ID NO: 154 - RNA, 23 nt, synthetic construct
  source 1..23: mol_type = other RNA
tcttagaccaaggagaaacggct

SEQ ID NO: 155 - RNA, 23 nt, synthetic construct
  source 1..23: mol_type = other RNA
tacttagaccaaggagaaacggc

SEQ ID NO: 156 - RNA, 23 nt, synthetic construct
  source 1..23: mol_type = other RNA
tcgctaaacactggttcttgcct

SEQ ID NO: 157 - RNA, 23 nt, synthetic construct
  source 1..23: mol_type = other RNA
tgcgctaaacactggttcttgcc

SEQ ID NO: 158 - RNA, 23 nt, synthetic construct
  source 1..23: mol_type = other RNA
tcgcgctaaacactggttcttgc

SEQ ID NO: 159 - RNA, 23 nt, synthetic construct
  source 1..23: mol_type = other RNA
ttcccgcgctaaacactggttct

SEQ ID NO: 160 - RNA, 23 nt, synthetic construct
  source 1..23: mol_type = other RNA
tagtcccgcgctaaacactggtt

SEQ ID NO: 161 - RNA, 23 nt, synthetic construct
  source 1..23: mol_type = other RNA
tgtagtcccgcgctaaacactgg

SEQ ID NO: 162 - RNA, 23 nt, synthetic construct
  source 1..23: mol_type = other RNA
tgaacagtagtcccgcgctaaac

SEQ ID NO: 163 - RNA, 23 nt, synthetic construct
  source 1..23: mol_type = other RNA
tggaacagtagtcccgcgctaaa

SEQ ID NO: 164 - RNA, 23 nt, synthetic construct
  source 1..23: mol_type = other RNA
tttggaacagtagtcccgcgcta

SEQ ID NO: 165 - RNA, 23 nt, synthetic construct
  source 1..23: mol_type = other RNA
tgtcggttggaattctttttgga

SEQ ID NO: 166 - RNA, 23 nt, synthetic construct
  source 1..23: mol_type = other RNA
tggtcggttggaattctttttgg

SEQ ID NO: 167 - RNA, 23 nt, synthetic construct
  source 1..23: mol_type = other RNA
tagctggtcggttggaattcttt

SEQ ID NO: 168 - RNA, 23 nt, synthetic construct
  source 1..23: mol_type = other RNA
taagctggtcggttggaattctt

SEQ ID NO: 169 - RNA, 23 nt, synthetic construct
  source 1..23: mol_type = other RNA
tcaagctggtcggttggaattct

SEQ ID NO: 170 - RNA, 23 nt, synthetic construct
  source 1..23: mol_type = other RNA
tacaagctggtcggttggaattc

SEQ ID NO: 171 - RNA, 23 nt, synthetic construct
  source 1..23: mol_type = other RNA
taacaagctggtcggttggaatt

SEQ ID NO: 172 - RNA, 23 nt, synthetic construct
  source 1..23: mol_type = other RNA
taaacaagctggtcggttggaat

SEQ ID NO: 173 - RNA, 23 nt, synthetic construct
  source 1..23: mol_type = other RNA
ttaaatacaaaccgaaggcaatg

SEQ ID NO: 174 - RNA, 23 nt, synthetic construct
  source 1..23: mol_type = other RNA
tagacactaaatacaaaccgaag

SEQ ID NO: 175 - RNA, 23 nt, synthetic construct
  source 1..23: mol_type = other RNA
tcggaggtcatgttcttacattc

SEQ ID NO: 176 - RNA, 23 nt, synthetic construct
  source 1..23: mol_type = other RNA
tactacacggaggtcatgttctt

SEQ ID NO: 177 - RNA, 23 nt, synthetic construct
  source 1..23: mol_type = other RNA
ttacagacactacacggaggtca

SEQ ID NO: 178 - RNA, 23 nt, synthetic construct
  source 1..23: mol_type = other RNA
ttaaggtattacagacactacac

SEQ ID NO: 179 - RNA, 23 nt, synthetic construct
  source 1..23: mol_type = other RNA
ttctttcacgtattgttcaaaaa

SEQ ID NO: 180 - RNA, 23 nt, synthetic construct
  source 1..23: mol_type = other RNA
tatctttcacgtattgttcaaaa

SEQ ID NO: 181 - RNA, 23 nt, synthetic construct
  source 1..23: mol_type = other RNA
tcatctttcacgtattgttcaaa

SEQ ID NO: 182 - RNA, 23 nt, synthetic construct
  source 1..23: mol_type = other RNA
tgcatctttcacgtattgttcaa

SEQ ID NO: 183 - RNA, 23 nt, synthetic construct
  source 1..23: mol_type = other RNA
tttgcatctttcacgtattgttc

SEQ ID NO: 184 - RNA, 23 nt, synthetic construct
  source 1..23: mol_type = other RNA
tttcaggtgcttgcatctttcac

SEQ ID NO: 185 - RNA, 23 nt, synthetic construct
  source 1..23: mol_type = other RNA
tcgcattcaaacagaaattcagg

SEQ ID NO: 186 - RNA, 23 nt, synthetic construct
  source 1..23: mol_type = other RNA
tgacgtttattactaacacaagg

SEQ ID NO: 187 - RNA, 23 nt, synthetic construct
  source 1..23: mol_type = other RNA
taagacgtttattactaacacaa

SEQ ID NO: 188 - RNA, 23 nt, synthetic construct
  source 1..23: mol_type = other RNA
tttgtggcaagacgtttattact

SEQ ID NO: 189 - RNA, 23 nt, synthetic construct
  source 1..23: mol_type = other RNA
tattgtggcaagacgtttattac

SEQ ID NO: 190 - RNA, 23 nt, synthetic construct
  source 1..23: mol_type = other RNA
tcttattgtggcaagacgtttat

SEQ ID NO: 191 - RNA, 23 nt, synthetic construct
  source 1..23: mol_type = other RNA
tgcttattgtggcaagacgttta

SEQ ID NO: 192 - RNA, 23 nt, synthetic construct
  source 1..23: mol_type = other RNA
tggcttattgtggcaagacgttt

SEQ ID NO: 193 - RNA, 23 nt, synthetic construct
  source 1..23: mol_type = other RNA
  modified_base 1: mod_base = OTHER; note = 2'-O-methyl ribonucleotide
  modified_base 2: mod_base = OTHER; note = 2'-fluoro ribonucleotide
  modified_base 3..6: mod_base = OTHER; note = 2'-O-methyl ribonucleotide
  modified_base 7: mod_base = OTHER; note = 2'-fluoro ribonucleotide
  modified_base 8..11: mod_base = OTHER; note = 2'-O-methyl ribonucleotide
  modified_base 12: mod_base = OTHER; note = 2'-fluoro ribonucleotide
  modified_base 13: mod_base = OTHER; note = 2'-O-methyl ribonucleotide
  modified_base 14: mod_base = OTHER; note = 2'-fluoro ribonucleotide
  modified_base 15: mod_base = OTHER; note = 2'-O-methyl ribonucleotide
  modified_base 16: mod_base = OTHER; note = 2'-fluoro ribonucleotide
  modified_base 17..23: mod_base = OTHER; note = 2'-O-methyl ribonucleotide
  modified_base 1..3: mod_base = OTHER; note = phosphorothioate linkage
  modified_base 21..23: mod_base = OTHER; note = phosphorothioate linkage
ttgctcgcttccgcatacccttc

SEQ ID NO: 194 - RNA, 23 nt, synthetic construct
  source 1..23: mol_type = other RNA
  modified_base 1: mod_base = OTHER; note = 2'-O-methyl ribonucleotide
  modified_base 2: mod_base = OTHER; note = 2'-fluoro ribonucleotide
  modified_base 3..6: mod_base = OTHER; note = 2'-O-methyl ribonucleotide
  modified_base 7: mod_base = OTHER; note = 2'-fluoro ribonucleotide
  modified_base 8..11: mod_base = OTHER; note = 2'-O-methyl ribonucleotide
  modified_base 12: mod_base = OTHER; note = 2'-fluoro ribonucleotide
  modified_base 13: mod_base = OTHER; note = 2'-O-methyl ribonucleotide
  modified_base 14: mod_base = OTHER; note = 2'-fluoro ribonucleotide
  modified_base 15: mod_base = OTHER; note = 2'-O-methyl ribonucleotide
  modified_base 16: mod_base = OTHER; note = 2'-fluoro ribonucleotide
  modified_base 17..23: mod_base = OTHER; note = 2'-O-methyl ribonucleotide
  modified_base 1..3: mod_base = OTHER; note = phosphorothioate linkage
  modified_base 21..23: mod_base = OTHER; note = phosphorothioate linkage
tgtgctcgcttccgcataccctt

SEQ ID NO: 195 - RNA, 23 nt, synthetic construct
  source 1..23: mol_type = other RNA
  modified_base 1: mod_base = OTHER; note = 2'-O-methyl ribonucleotide
  modified_base 2: mod_base = OTHER; note = 2'-fluoro ribonucleotide
  modified_base 3..6: mod_base = OTHER; note = 2'-O-methyl ribonucleotide
  modified_base 7: mod_base = OTHER; note = 2'-fluoro ribonucleotide
  modified_base 8..11: mod_base = OTHER; note = 2'-O-methyl ribonucleotide
  modified_base 12: mod_base = OTHER; note = 2'-fluoro ribonucleotide
  modified_base 13: mod_base = OTHER; note = 2'-O-methyl ribonucleotide
  modified_base 14: mod_base = OTHER; note = 2'-fluoro ribonucleotide
  modified_base 15: mod_base = OTHER; note = 2'-O-methyl ribonucleotide
  modified_base 16: mod_base = OTHER; note = 2'-fluoro ribonucleotide
  modified_base 17..23: mod_base = OTHER; note = 2'-O-methyl ribonucleotide
  modified_base 1..3: mod_base = OTHER; note = phosphorothioate linkage
  modified_base 21..23: mod_base = OTHER; note = phosphorothioate linkage
tgggtgctcgcttccgcataccc

SEQ ID NO: 196 - RNA, 23 nt, synthetic construct
  source 1..23: mol_type = other RNA
  modified_base 1: mod_base = OTHER; note = 2'-O-methyl ribonucleotide
  modified_base 2: mod_base = OTHER; note = 2'-fluoro ribonucleotide
  modified_base 3..6: mod_base = OTHER; note = 2'-O-methyl ribonucleotide
  modified_base 7: mod_base = OTHER; note = 2'-fluoro ribonucleotide
  modified_base 8..11: mod_base = OTHER; note = 2'-O-methyl ribonucleotide
  modified_base 12: mod_base = OTHER; note = 2'-fluoro ribonucleotide
  modified_base 13: mod_base = OTHER; note = 2'-O-methyl ribonucleotide
  modified_base 14: mod_base = OTHER; note = 2'-fluoro ribonucleotide
  modified_base 15: mod_base = OTHER; note = 2'-O-methyl ribonucleotide
  modified_base 16: mod_base = OTHER; note = 2'-fluoro ribonucleotide
  modified_base 17..23: mod_base = OTHER; note = 2'-O-methyl ribonucleotide
  modified_base 1..3: mod_base = OTHER; note = phosphorothioate linkage
  modified_base 21..23: mod_base = OTHER; note = phosphorothioate linkage
ttggggtgctcgcttccgcatac

SEQ ID NO: 197 - RNA, 23 nt, synthetic construct
  source 1..23: mol_type = other RNA
  modified_base 1: mod_base = OTHER; note = 2'-O-methyl ribonucleotide
  modified_base 2: mod_base = OTHER; note = 2'-fluoro ribonucleotide
  modified_base 3..6: mod_base = OTHER; note = 2'-O-methyl ribonucleotide
  modified_base 7: mod_base = OTHER; note = 2'-fluoro ribonucleotide
  modified_base 8..11: mod_base = OTHER; note = 2'-O-methyl ribonucleotide
  modified_base 12: mod_base = OTHER; note = 2'-fluoro ribonucleotide
  modified_base 13: mod_base = OTHER; note = 2'-O-methyl ribonucleotide
  modified_base 14: mod_base = OTHER; note = 2'-fluoro ribonucleotide
  modified_base 15: mod_base = OTHER; note = 2'-O-methyl ribonucleotide
  modified_base 16: mod_base = OTHER; note = 2'-fluoro ribonucleotide
  modified_base 17..23: mod_base = OTHER; note = 2'-O-methyl ribonucleotide
  modified_base 1..3: mod_base = OTHER; note = phosphorothioate linkage
  modified_base 21..23: mod_base = OTHER; note = phosphorothioate linkage
tacaccggcaggagccatctcag

SEQ ID NO: 198 - RNA, 23 nt, synthetic construct
  source 1..23: mol_type = other RNA
  modified_base 1: mod_base = OTHER; note = 2'-O-methyl ribonucleotide
  modified_base 2: mod_base = OTHER; note = 2'-fluoro ribonucleotide
  modified_base 3..6: mod_base = OTHER; note = 2'-O-methyl ribonucleotide
  modified_base 7: mod_base = OTHER; note = 2'-fluoro ribonucleotide
  modified_base 8..11: mod_base = OTHER; note = 2'-O-methyl ribonucleotide
  modified_base 12: mod_base = OTHER; note = 2'-fluoro ribonucleotide
  modified_base 13: mod_base = OTHER; note = 2'-O-methyl ribonucleotide
  modified_base 14: mod_base = OTHER; note = 2'-fluoro ribonucleotide
  modified_base 15: mod_base = OTHER; note = 2'-O-methyl ribonucleotide
  modified_base 16: mod_base = OTHER; note = 2'-fluoro ribonucleotide
  modified_base 17..23: mod_base = OTHER; note = 2'-O-methyl ribonucleotide
  modified_base 1..3: mod_base = OTHER; note = phosphorothioate linkage
  modified_base 21..23: mod_base = OTHER; note = phosphorothioate linkage
ttatgtacacccggtcacctgca

SEQ ID NO: 199 - RNA, 23 nt, synthetic construct
  source 1..23: mol_type = other RNA
  modified_base 1: mod_base = OTHER; note = 2'-O-methyl ribonucleotide
  modified_base 2: mod_base = OTHER; note = 2'-fluoro ribonucleotide
  modified_base 3..6: mod_base = OTHER; note = 2'-O-methyl ribonucleotide
  modified_base 7: mod_base = OTHER; note = 2'-fluoro ribonucleotide
  modified_base 8..11: mod_base = OTHER; note = 2'-O-methyl ribonucleotide
  modified_base 12: mod_base = OTHER; note = 2'-fluoro ribonucleotide
  modified_base 13: mod_base = OTHER; note = 2'-O-methyl ribonucleotide
  modified_base 14: mod_base = OTHER; note = 2'-fluoro ribonucleotide
  modified_base 15: mod_base = OTHER; note = 2'-O-methyl ribonucleotide
  modified_base 16: mod_base = OTHER; note = 2'-fluoro ribonucleotide
  modified_base 17..23: mod_base = OTHER; note = 2'-O-methyl ribonucleotide
  modified_base 1..3: mod_base = OTHER; note = phosphorothioate linkage
  modified_base 21..23: mod_base = OTHER; note = phosphorothioate linkage
tgggtgtatgtacacccggtcac

SEQ ID NO: 200 - RNA, 23 nt, synthetic construct
  source 1..23: mol_type = other RNA
  modified_base 1: mod_base = OTHER; note = 2'-O-methyl ribonucleotide
  modified_base 2: mod_base = OTHER; note = 2'-fluoro ribonucleotide
  modified_base 3..6: mod_base = OTHER; note = 2'-O-methyl ribonucleotide
  modified_base 7: mod_base = OTHER; note = 2'-fluoro ribonucleotide
  modified_base 8..11: mod_base = OTHER; note = 2'-O-methyl ribonucleotide
  modified_base 12: mod_base = OTHER; note = 2'-fluoro ribonucleotide
  modified_base 13: mod_base = OTHER; note = 2'-O-methyl ribonucleotide
  modified_base 14: mod_base = OTHER; note = 2'-fluoro ribonucleotide
  modified_base 15: mod_base = OTHER; note = 2'-O-methyl ribonucleotide
  modified_base 16: mod_base = OTHER; note = 2'-fluoro ribonucleotide
  modified_base 17..23: mod_base = OTHER; note = 2'-O-methyl ribonucleotide
  modified_base 1..3: mod_base = OTHER; note = phosphorothioate linkage
  modified_base 21..23: mod_base = OTHER; note = phosphorothioate linkage
taggggtgtatgtacacccggtc

SEQ ID NO: 201 - RNA, 23 nt, synthetic construct
  source 1..23: mol_type = other RNA
  modified_base 1: mod_base = OTHER; note = 2'-O-methyl ribonucleotide
  modified_base 2: mod_base = OTHER; note = 2'-fluoro ribonucleotide
  modified_base 3..6: mod_base = OTHER; note = 2'-O-methyl ribonucleotide
  modified_base 7: mod_base = OTHER; note = 2'-fluoro ribonucleotide
  modified_base 8..11: mod_base = OTHER; note = 2'-O-methyl ribonucleotide
  modified_base 12: mod_base = OTHER; note = 2'-fluoro ribonucleotide
  modified_base 13: mod_base = OTHER; note = 2'-O-methyl ribonucleotide
  modified_base 14: mod_base = OTHER; note = 2'-fluoro ribonucleotide
  modified_base 15: mod_base = OTHER; note = 2'-O-methyl ribonucleotide
  modified_base 16: mod_base = OTHER; note = 2'-fluoro ribonucleotide
  modified_base 17..23: mod_base = OTHER; note = 2'-O-methyl ribonucleotide
  modified_base 1..3: mod_base = OTHER; note = phosphorothioate linkage
  modified_base 21..23: mod_base = OTHER; note = phosphorothioate linkage
taaggggtgtatgtacacccggt

SEQ ID NO: 202 - RNA, 23 nt, synthetic construct
  source 1..23: mol_type = other RNA
  modified_base 1: mod_base = OTHER; note = 2'-O-methyl ribonucleotide
  modified_base 2: mod_base = OTHER; note = 2'-fluoro ribonucleotide
  modified_base 3..6: mod_base = OTHER; note = 2'-O-methyl ribonucleotide
  modified_base 7: mod_base = OTHER; note = 2'-fluoro ribonucleotide
  modified_base 8..11: mod_base = OTHER; note = 2'-O-methyl ribonucleotide
  modified_base 12: mod_base = OTHER; note = 2'-fluoro ribonucleotide
  modified_base 13: mod_base = OTHER; note = 2'-O-methyl ribonucleotide
  modified_base 14: mod_base = OTHER; note = 2'-fluoro ribonucleotide
  modified_base 15: mod_base = OTHER; note = 2'-O-methyl ribonucleotide
  modified_base 16: mod_base = OTHER; note = 2'-fluoro ribonucleotide
  modified_base 17..23: mod_base = OTHER; note = 2'-O-methyl ribonucleotide
  modified_base 1..3: mod_base = OTHER; note = phosphorothioate linkage
  modified_base 21..23: mod_base = OTHER; note = phosphorothioate linkage
tgaaggggtgtatgtacacccgg

SEQ ID NO: 203 - RNA, 23 nt, synthetic construct
  source 1..23: mol_type = other RNA
  modified_base 1: mod_base = OTHER; note = 2'-O-methyl ribonucleotide
  modified_base 2: mod_base = OTHER; note = 2'-fluoro ribonucleotide
  modified_base 3..6: mod_base = OTHER; note = 2'-O-methyl ribonucleotide
  modified_base 7: mod_base = OTHER; note = 2'-fluoro ribonucleotide
  modified_base 8..11: mod_base = OTHER; note = 2'-O-methyl ribonucleotide
  modified_base 12: mod_base = OTHER; note = 2'-fluoro ribonucleotide
  modified_base 13: mod_base = OTHER; note = 2'-O-methyl ribonucleotide
  modified_base 14: mod_base = OTHER; note = 2'-fluoro ribonucleotide
  modified_base 15: mod_base = OTHER; note = 2'-O-methyl ribonucleotide
  modified_base 16: mod_base = OTHER; note = 2'-fluoro ribonucleotide
  modified_base 17..23: mod_base = OTHER; note = 2'-O-methyl ribonucleotide
  modified_base 1..3: mod_base = OTHER; note = phosphorothioate linkage
  modified_base 21..23: mod_base = OTHER; note = phosphorothioate linkage
tggtggaaggggtgtatgtacac

SEQ ID NO: 204 - RNA, 23 nt, synthetic construct
  source 1..23: mol_type = other RNA
  modified_base 1: mod_base = OTHER; note = 2'-O-methyl ribonucleotide
  modified_base 2: mod_base = OTHER; note = 2'-fluoro ribonucleotide
  modified_base 3..6: mod_base = OTHER; note = 2'-O-methyl ribonucleotide
  modified_base 7: mod_base = OTHER; note = 2'-fluoro ribonucleotide
  modified_base 8..11: mod_base = OTHER; note = 2'-O-methyl ribonucleotide
  modified_base 12: mod_base = OTHER; note = 2'-fluoro ribonucleotide
  modified_base 13: mod_base = OTHER; note = 2'-O-methyl ribonucleotide
  modified_base 14: mod_base = OTHER; note = 2'-fluoro ribonucleotide
  modified_base 15: mod_base = OTHER; note = 2'-O-methyl ribonucleotide
  modified_base 16: mod_base = OTHER; note = 2'-fluoro ribonucleotide
  modified_base 17..23: mod_base = OTHER; note = 2'-O-methyl ribonucleotide
  modified_base 1..3: mod_base = OTHER; note = phosphorothioate linkage
  modified_base 21..23: mod_base = OTHER; note = phosphorothioate linkage
taggtggaaggggtgtatgtaca

SEQ ID NO: 205 - RNA, 23 nt, synthetic construct
  source 1..23: mol_type = other RNA
  modified_base 1: mod_base = OTHER; note = 2'-O-methyl ribonucleotide
  modified_base 2: mod_base = OTHER; note = 2'-fluoro ribonucleotide
  modified_base 3..6: mod_base = OTHER; note = 2'-O-methyl ribonucleotide
  modified_base 7: mod_base = OTHER; note = 2'-fluoro ribonucleotide
  modified_base 8..11: mod_base = OTHER; note = 2'-O-methyl ribonucleotide
  modified_base 12: mod_base = OTHER; note = 2'-fluoro ribonucleotide
  modified_base 13: mod_base = OTHER; note = 2'-O-methyl ribonucleotide
  modified_base 14: mod_base = OTHER; note = 2'-fluoro ribonucleotide
  modified_base 15: mod_base = OTHER; note = 2'-O-methyl ribonucleotide
  modified_base 16: mod_base = OTHER; note = 2'-fluoro ribonucleotide
  modified_base 17..23: mod_base = OTHER; note = 2'-O-methyl ribonucleotide
  modified_base 1..3: mod_base = OTHER; note = phosphorothioate linkage
  modified_base 21..23: mod_base = OTHER; note = phosphorothioate linkage
tctctcattgtggatgacgaggt

SEQ ID NO: 206 - RNA, 23 nt, synthetic construct
  source 1..23: mol_type = other RNA
  modified_base 1: mod_base = OTHER; note = 2'-O-methyl ribonucleotide
  modified_base 2: mod_base = OTHER; note = 2'-fluoro ribonucleotide
  modified_base 3..6: mod_base = OTHER; note = 2'-O-methyl ribonucleotide
  modified_base 7: mod_base = OTHER; note = 2'-fluoro ribonucleotide
  modified_base 8..11: mod_base = OTHER; note = 2'-O-methyl ribonucleotide
  modified_base 12: mod_base = OTHER; note = 2'-fluoro ribonucleotide
  modified_base 13: mod_base = OTHER; note = 2'-O-methyl ribonucleotide
  modified_base 14: mod_base = OTHER; note = 2'-fluoro ribonucleotide
  modified_base 15: mod_base = OTHER; note = 2'-O-methyl ribonucleotide
  modified_base 16: mod_base = OTHER; note = 2'-fluoro ribonucleotide
  modified_base 17..23: mod_base = OTHER; note = 2'-O-methyl ribonucleotide
  modified_base 1..3: mod_base = OTHER; note = phosphorothioate linkage
  modified_base 21..23: mod_base = OTHER; note = phosphorothioate linkage
tgtactctcattgtggatgacga

SEQ ID NO: 207 - RNA, 23 nt, synthetic construct
  source 1..23: mol_type = other RNA
  modified_base 1: mod_base = OTHER; note = 2'-O-methyl ribonucleotide
  modified_base 2: mod_base = OTHER; note = 2'-fluoro ribonucleotide
  modified_base 3..6: mod_base = OTHER; note = 2'-O-methyl ribonucleotide
  modified_base 7: mod_base = OTHER; note = 2'-fluoro ribonucleotide
  modified_base 8..11: mod_base = OTHER; note = 2'-O-methyl ribonucleotide
  modified_base 12: mod_base = OTHER; note = 2'-fluoro ribonucleotide
  modified_base 13: mod_base = OTHER; note = 2'-O-methyl ribonucleotide
  modified_base 14: mod_base = OTHER; note = 2'-fluoro ribonucleotide
  modified_base 15: mod_base = OTHER; note = 2'-O-methyl ribonucleotide
  modified_base 16: mod_base = OTHER; note = 2'-fluoro ribonucleotide
  modified_base 17..23: mod_base = OTHER; note = 2'-O-methyl ribonucleotide
  modified_base 1..3: mod_base = OTHER; note = phosphorothioate linkage
  modified_base 21..23: mod_base = OTHER; note = phosphorothioate linkage
tggtactctcattgtggatgacg

SEQ ID NO: 208 - RNA, 23 nt, synthetic construct
  source 1..23: mol_type = other RNA
  modified_base 1: mod_base = OTHER; note = 2'-O-methyl ribonucleotide
  modified_base 2: mod_base = OTHER; note = 2'-fluoro ribonucleotide
  modified_base 3..6: mod_base = OTHER; note = 2'-O-methyl ribonucleotide
  modified_base 7: mod_base = OTHER; note = 2'-fluoro ribonucleotide
  modified_base 8..11: mod_base = OTHER; note = 2'-O-methyl ribonucleotide
  modified_base 12: mod_base = OTHER; note = 2'-fluoro ribonucleotide
  modified_base 13: mod_base = OTHER; note = 2'-O-methyl ribonucleotide
  modified_base 14: mod_base = OTHER; note = 2'-fluoro ribonucleotide
  modified_base 15: mod_base = OTHER; note = 2'-O-methyl ribonucleotide
  modified_base 16: mod_base = OTHER; note = 2'-fluoro ribonucleotide
  modified_base 17..23: mod_base = OTHER; note = 2'-O-methyl ribonucleotide
  modified_base 1..3: mod_base = OTHER; note = phosphorothioate linkage
  modified_base 21..23: mod_base = OTHER; note = phosphorothioate linkage
taggtactctcattgtggatgac

SEQ ID NO: 209 - RNA, 23 nt, synthetic construct
  source 1..23: mol_type = other RNA
  modified_base 1: mod_base = OTHER; note = 2'-O-methyl ribonucleotide
  modified_base 2: mod_base = OTHER; note = 2'-fluoro ribonucleotide
  modified_base 3..6: mod_base = OTHER; note = 2'-O-methyl ribonucleotide
  modified_base 7: mod_base = OTHER; note = 2'-fluoro ribonucleotide
  modified_base 8..11: mod_base = OTHER; note = 2'-O-methyl ribonucleotide
  modified_base 12: mod_base = OTHER; note = 2'-fluoro ribonucleotide
  modified_base 13: mod_base = OTHER; note = 2'-O-methyl ribonucleotide
  modified_base 14: mod_base = OTHER; note = 2'-fluoro ribonucleotide
  modified_base 15: mod_base = OTHER; note = 2'-O-methyl ribonucleotide
  modified_base 16: mod_base = OTHER; note = 2'-fluoro ribonucleotide
  modified_base 17..23: mod_base = OTHER; note = 2'-O-methyl ribonucleotide
  modified_base 1..3: mod_base = OTHER; note = phosphorothioate linkage
  modified_base 21..23: mod_base = OTHER; note = phosphorothioate linkage
tcaggtactctcattgtggatga

SEQ ID NO: 210 - RNA, 23 nt, synthetic construct
  source 1..23: mol_type = other RNA
  modified_base 1: mod_base = OTHER; note = 2'-O-methyl ribonucleotide
  modified_base 2: mod_base = OTHER; note = 2'-fluoro ribonucleotide
  modified_base 3..6: mod_base = OTHER; note = 2'-O-methyl ribonucleotide
  modified_base 7: mod_base = OTHER; note = 2'-fluoro ribonucleotide
  modified_base 8..11: mod_base = OTHER; note = 2'-O-methyl ribonucleotide
  modified_base 12: mod_base = OTHER; note = 2'-fluoro ribonucleotide
  modified_base 13: mod_base = OTHER; note = 2'-O-methyl ribonucleotide
  modified_base 14: mod_base = OTHER; note = 2'-fluoro ribonucleotide
  modified_base 15: mod_base = OTHER; note = 2'-O-methyl ribonucleotide
  modified_base 16: mod_base = OTHER; note = 2'-fluoro ribonucleotide
  modified_base 17..23: mod_base = OTHER; note = 2'-O-methyl ribonucleotide
  modified_base 1..3: mod_base = OTHER; note = phosphorothioate linkage
  modified_base 21..23: mod_base = OTHER; note = phosphorothioate linkage
tcacaggtactctcattgtggat

SEQ ID NO: 211 - RNA, 23 nt, synthetic construct
  source 1..23: mol_type = other RNA
  modified_base 1: mod_base = OTHER; note = 2'-O-methyl ribonucleotide
  modified_base 2: mod_base = OTHER; note = 2'-fluoro ribonucleotide
  modified_base 3..6: mod_base = OTHER; note = 2'-O-methyl ribonucleotide
  modified_base 7: mod_base = OTHER; note = 2'-fluoro ribonucleotide
  modified_base 8..11: mod_base = OTHER; note = 2'-O-methyl ribonucleotide
  modified_base 12: mod_base = OTHER; note = 2'-fluoro ribonucleotide
  modified_base 13: mod_base = OTHER; note = 2'-O-methyl ribonucleotide
  modified_base 14: mod_base = OTHER; note = 2'-fluoro ribonucleotide
  modified_base 15: mod_base = OTHER; note = 2'-O-methyl ribonucleotide
  modified_base 16: mod_base = OTHER; note = 2'-fluoro ribonucleotide
  modified_base 17..23: mod_base = OTHER; note = 2'-O-methyl ribonucleotide
  modified_base 1..3: mod_base = OTHER; note = phosphorothioate linkage
  modified_base 21..23: mod_base = OTHER; note = phosphorothioate linkage
tgctgctcacaggtactctcatt

SEQ ID NO: 212 - RNA, 23 nt, synthetic construct
  source 1..23: mol_type = other RNA
  modified_base 1: mod_base = OTHER; note = 2'-O-methyl ribonucleotide
  modified_base 2: mod_base = OTHER; note = 2'-fluoro ribonucleotide
  modified_base 3..6: mod_base = OTHER; note = 2'-O-methyl ribonucleotide
  modified_base 7: mod_base = OTHER; note = 2'-fluoro ribonucleotide
  modified_base 8..11: mod_base = OTHER; note = 2'-O-methyl ribonucleotide
  modified_base 12: mod_base = OTHER; note = 2'-fluoro ribonucleotide
  modified_base 13: mod_base = OTHER; note = 2'-O-methyl ribonucleotide
  modified_base 14: mod_base = OTHER; note = 2'-fluoro ribonucleotide
  modified_base 15: mod_base = OTHER; note = 2'-O-methyl ribonucleotide
  modified_base 16: mod_base = OTHER; note = 2'-fluoro ribonucleotide
  modified_base 17..23: mod_base = OTHER; note = 2'-O-methyl ribonucleotide
  modified_base 1..3: mod_base = OTHER; note = phosphorothioate linkage
  modified_base 21..23: mod_base = OTHER; note = phosphorothioate linkage
tccggcattggcctttgccagct

SEQ ID NO: 213 - RNA, 23 nt, synthetic construct
  source 1..23: mol_type = other RNA
  modified_base 1: mod_base = OTHER; note = 2'-O-methyl ribonucleotide
  modified_base 2: mod_base = OTHER; note = 2'-fluoro ribonucleotide
  modified_base 3..6: mod_base = OTHER; note = 2'-O-methyl ribonucleotide
  modified_base 7: mod_base = OTHER; note = 2'-fluoro ribonucleotide
  modified_base 8..11: mod_base = OTHER; note = 2'-O-methyl ribonucleotide
  modified_base 12: mod_base = OTHER; note = 2'-fluoro ribonucleotide
  modified_base 13: mod_base = OTHER; note = 2'-O-methyl ribonucleotide
  modified_base 14: mod_base = OTHER; note = 2'-fluoro ribonucleotide
  modified_base 15: mod_base = OTHER; note = 2'-O-methyl ribonucleotide
  modified_base 16: mod_base = OTHER; note = 2'-fluoro ribonucleotide
  modified_base 17..23: mod_base = OTHER; note = 2'-O-methyl ribonucleotide
  modified_base 1..3: mod_base = OTHER; note = phosphorothioate linkage
  modified_base 21..23: mod_base = OTHER; note = phosphorothioate linkage
tttcccggcattggcctttgcca

SEQ ID NO: 214 - RNA, 23 nt, synthetic construct
  source 1..23: mol_type = other RNA
  modified_base 1: mod_base = OTHER; note = 2'-O-methyl ribonucleotide
  modified_base 2: mod_base = OTHER; note = 2'-fluoro ribonucleotide
  modified_base 3..6: mod_base = OTHER; note = 2'-O-methyl ribonucleotide
  modified_base 7: mod_base = OTHER; note = 2'-fluoro ribonucleotide
  modified_base 8..11: mod_base = OTHER; note = 2'-O-methyl ribonucleotide
  modified_base 12: mod_base = OTHER; note = 2'-fluoro ribonucleotide
  modified_base 13: mod_base = OTHER; note = 2'-O-methyl ribonucleotide
  modified_base 14: mod_base = OTHER; note = 2'-fluoro ribonucleotide
  modified_base 15: mod_base = OTHER; note = 2'-O-methyl ribonucleotide
  modified_base 16: mod_base = OTHER; note = 2'-fluoro ribonucleotide
  modified_base 17..23: mod_base = OTHER; note = 2'-O-methyl ribonucleotide
  modified_base 1..3: mod_base = OTHER; note = phosphorothioate linkage
  modified_base 21..23: mod_base = OTHER; note = phosphorothioate linkage
tggggatgtcttggcctgaattg

SEQ ID NO: 215 - RNA, 23 nt, synthetic construct
  source 1..23: mol_type = other RNA
  modified_base 1: mod_base = OTHER; note = 2'-O-methyl ribonucleotide
  modified_base 2: mod_base = OTHER; note = 2'-fluoro ribonucleotide
  modified_base 3..6: mod_base = OTHER; note = 2'-O-methyl ribonucleotide
  modified_base 7: mod_base = OTHER; note = 2'-fluoro ribonucleotide
  modified_base 8..11: mod_base = OTHER; note = 2'-O-methyl ribonucleotide
  modified_base 12: mod_base = OTHER; note = 2'-fluoro ribonucleotide
  modified_base 13: mod_base = OTHER; note = 2'-O-methyl ribonucleotide
  modified_base 14: mod_base = OTHER; note = 2'-fluoro ribonucleotide
  modified_base 15: mod_base = OTHER; note = 2'-O-methyl ribonucleotide
  modified_base 16: mod_base = OTHER; note = 2'-fluoro ribonucleotide
  modified_base 17..23: mod_base = OTHER; note = 2'-O-methyl ribonucleotide
  modified_base 1..3: mod_base = OTHER; note = phosphorothioate linkage
  modified_base 21..23: mod_base = OTHER; note = phosphorothioate linkage
taggggatgtcttggcctgaatt

SEQ ID NO: 216 - RNA, 23 nt, synthetic construct
  source 1..23: mol_type = other RNA
  modified_base 1: mod_base = OTHER; note = 2'-O-methyl ribonucleotide
  modified_base 2: mod_base = OTHER; note = 2'-fluoro ribonucleotide
  modified_base 3..6: mod_base = OTHER; note = 2'-O-methyl ribonucleotide
  modified_base 7: mod_base = OTHER; note = 2'-fluoro ribonucleotide
  modified_base 8..11: mod_base = OTHER; note = 2'-O-methyl ribonucleotide
  modified_base 12: mod_base = OTHER; note = 2'-fluoro ribonucleotide
  modified_base 13: mod_base = OTHER; note = 2'-O-methyl ribonucleotide
  modified_base 14: mod_base = OTHER; note = 2'-fluoro ribonucleotide
  modified_base 15: mod_base = OTHER; note = 2'-O-methyl ribonucleotide
  modified_base 16: mod_base = OTHER; note = 2'-fluoro ribonucleotide
  modified_base 17..23: mod_base = OTHER; note = 2'-O-methyl ribonucleotide
  modified_base 1..3: mod_base = OTHER; note = phosphorothioate linkage
  modified_base 21..23: mod_base = OTHER; note = phosphorothioate linkage
tctgtagggccttttcatccaca

SEQ ID NO: 217 - RNA, 23 nt, synthetic construct
  source 1..23: mol_type = other RNA
  modified_base 1: mod_base = OTHER; note = 2'-O-methyl ribonucleotide
  modified_base 2: mod_base = OTHER; note = 2'-fluoro ribonucleotide
  modified_base 3..6: mod_base = OTHER; note = 2'-O-methyl ribonucleotide
  modified_base 7: mod_base = OTHER; note = 2'-fluoro ribonucleotide
  modified_base 8..11: mod_base = OTHER; note = 2'-O-methyl ribonucleotide
  modified_base 12: mod_base = OTHER; note = 2'-fluoro ribonucleotide
  modified_base 13: mod_base = OTHER; note = 2'-O-methyl ribonucleotide
  modified_base 14: mod_base = OTHER; note = 2'-fluoro ribonucleotide
  modified_base 15: mod_base = OTHER; note = 2'-O-methyl ribonucleotide
  modified_base 16: mod_base = OTHER; note = 2'-fluoro ribonucleotide
  modified_base 17..23: mod_base = OTHER; note = 2'-O-methyl ribonucleotide
  modified_base 1..3: mod_base = OTHER; note = phosphorothioate linkage
  modified_base 21..23: mod_base = OTHER; note = phosphorothioate linkage
tgcagcgactagcaccagctggt

SEQ ID NO: 218 - RNA, 23 nt, synthetic construct
  source 1..23: mol_type = other RNA
  modified_base 1: mod_base = OTHER; note = 2'-O-methyl ribonucleotide
  modified_base 2: mod_base = OTHER; note = 2'-fluoro ribonucleotide
  modified_base 3..6: mod_base = OTHER; note = 2'-O-methyl ribonucleotide
  modified_base 7: mod_base = OTHER; note = 2'-fluoro ribonucleotide
  modified_base 8..11: mod_base = OTHER; note = 2'-O-methyl ribonucleotide
  modified_base 12: mod_base = OTHER; note = 2'-fluoro ribonucleotide
  modified_base 13: mod_base = OTHER; note = 2'-O-methyl ribonucleotide
  modified_base 14: mod_base = OTHER; note = 2'-fluoro ribonucleotide
  modified_base 15: mod_base = OTHER; note = 2'-O-methyl ribonucleotide
  modified_base 16: mod_base = OTHER; note = 2'-fluoro ribonucleotide
  modified_base 17..23: mod_base = OTHER; note = 2'-O-methyl ribonucleotide
  modified_base 1..3: mod_base = OTHER; note = phosphorothioate linkage
  modified_base 21..23: mod_base = OTHER; note = phosphorothioate linkage
tgtcaagttttgcagcgactagc

SEQ ID NO: 219 - RNA, 23 nt, synthetic construct
  source 1..23: mol_type = other RNA
  modified_base 1: mod_base = OTHER; note = 2'-O-methyl ribonucleotide
  modified_base 2: mod_base = OTHER; note = 2'-fluoro ribonucleotide
  modified_base 3..6: mod_base = OTHER; note = 2'-O-methyl ribonucleotide
  modified_base 7: mod_base = OTHER; note = 2'-fluoro ribonucleotide
  modified_base 8..11: mod_base = OTHER; note = 2'-O-methyl ribonucleotide
  modified_base 12: mod_base = OTHER; note = 2'-fluoro ribonucleotide
  modified_base 13: mod_base = OTHER; note = 2'-O-methyl ribonucleotide
  modified_base 14: mod_base = OTHER; note = 2'-fluoro ribonucleotide
  modified_base 15: mod_base = OTHER; note = 2'-O-methyl ribonucleotide
  modified_base 16: mod_base = OTHER; note = 2'-fluoro ribonucleotide
  modified_base 17..23: mod_base = OTHER; note = 2'-O-methyl ribonucleotide
  modified_base 1..3: mod_base = OTHER; note = phosphorothioate linkage
  modified_base 21..23: mod_base = OTHER; note = phosphorothioate linkage
tcggtgtcaagttttgcagcgac

SEQ ID NO: 220 - RNA, 23 nt, synthetic construct
  source 1..23: mol_type = other RNA
  modified_base 1: mod_base = OTHER; note = 2'-O-methyl ribonucleotide
  modified_base 2: mod_base = OTHER; note = 2'-fluoro ribonucleotide
  modified_base 3..6: mod_base = OTHER; note = 2'-O-methyl ribonucleotide
  modified_base 7: mod_base = OTHER; note = 2'-fluoro ribonucleotide
  modified_base 8..11: mod_base = OTHER; note = 2'-O-methyl ribonucleotide
  modified_base 12: mod_base = OTHER; note = 2'-fluoro ribonucleotide
  modified_base 13: mod_base = OTHER; note = 2'-O-methyl ribonucleotide
  modified_base 14: mod_base = OTHER; note = 2'-fluoro ribonucleotide
  modified_base 15: mod_base = OTHER; note = 2'-O-methyl ribonucleotide
  modified_base 16: mod_base = OTHER; note = 2'-fluoro ribonucleotide
  modified_base 17..23: mod_base = OTHER; note = 2'-O-methyl ribonucleotide
  modified_base 1..3: mod_base = OTHER; note = phosphorothioate linkage
  modified_base 21..23: mod_base = OTHER; note = phosphorothioate linkage
ttcggtgtcaagttttgcagcga

SEQ ID NO: 221 - RNA, 23 nt, synthetic construct
  source 1..23: mol_type = other RNA
  modified_base 1: mod_base = OTHER; note = 2'-O-methyl ribonucleotide
  modified_base 2: mod_base = OTHER; note = 2'-fluoro ribonucleotide
  modified_base 3..6: mod_base = OTHER; note = 2'-O-methyl ribonucleotide
  modified_base 7: mod_base = OTHER; note = 2'-fluoro ribonucleotide
  modified_base 8..11: mod_base = OTHER; note = 2'-O-methyl ribonucleotide
  modified_base 12: mod_base = OTHER; note = 2'-fluoro ribonucleotide
  modified_base 13: mod_base = OTHER; note = 2'-O-methyl ribonucleotide
  modified_base 14: mod_base = OTHER; note = 2'-fluoro ribonucleotide
  modified_base 15: mod_base = OTHER; note = 2'-O-methyl ribonucleotide
  modified_base 16: mod_base = OTHER; note = 2'-fluoro ribonucleotide
  modified_base 17..23: mod_base = OTHER; note = 2'-O-methyl ribonucleotide
  modified_base 1..3: mod_base = OTHER; note = phosphorothioate linkage
  modified_base 21..23: mod_base = OTHER; note = phosphorothioate linkage
taacttgtcttcggtgtcaagtt

SEQ ID NO: 222 - RNA, 23 nt, synthetic construct
  source 1..23: mol_type = other RNA
  modified_base 1: mod_base = OTHER; note = 2'-O-methyl ribonucleotide
  modified_base 2: mod_base = OTHER; note = 2'-fluoro ribonucleotide
  modified_base 3..6: mod_base = OTHER; note = 2'-O-methyl ribonucleotide
  modified_base 7: mod_base = OTHER; note = 2'-fluoro ribonucleotide
  modified_base 8..11: mod_base = OTHER; note = 2'-O-methyl ribonucleotide
  modified_base 12: mod_base = OTHER; note = 2'-fluoro ribonucleotide
  modified_base 13: mod_base = OTHER; note = 2'-O-methyl ribonucleotide
  modified_base 14: mod_base = OTHER; note = 2'-fluoro ribonucleotide
  modified_base 15: mod_base = OTHER; note = 2'-O-methyl ribonucleotide
  modified_base 16: mod_base = OTHER; note = 2'-fluoro ribonucleotide
  modified_base 17..23: mod_base = OTHER; note = 2'-O-methyl ribonucleotide
  modified_base 1..3: mod_base = OTHER; note = phosphorothioate linkage
  modified_base 21..23: mod_base = OTHER; note = phosphorothioate linkage
tcaacttgtcttcggtgtcaagt

SEQ ID NO: 223 - RNA, 23 nt, synthetic construct
  source 1..23: mol_type = other RNA
  modified_base 1: mod_base = OTHER; note = 2'-O-methyl ribonucleotide
  modified_base 2: mod_base = OTHER; note = 2'-fluoro ribonucleotide
  modified_base 3..6: mod_base = OTHER; note = 2'-O-methyl ribonucleotide
  modified_base 7: mod_base = OTHER; note = 2'-fluoro ribonucleotide
  modified_base 8..11: mod_base = OTHER; note = 2'-O-methyl ribonucleotide
  modified_base 12: mod_base = OTHER; note = 2'-fluoro ribonucleotide
  modified_base 13: mod_base = OTHER; note = 2'-O-methyl ribonucleotide
  modified_base 14: mod_base = OTHER; note = 2'-fluoro ribonucleotide
  modified_base 15: mod_base = OTHER; note = 2'-O-methyl ribonucleotide
  modified_base 16: mod_base = OTHER; note = 2'-fluoro ribonucleotide
  modified_base 17..23: mod_base = OTHER; note = 2'-O-methyl ribonucleotide
  modified_base 1..3: mod_base = OTHER; note = phosphorothioate linkage
  modified_base 21..23: mod_base = OTHER; note = phosphorothioate linkage
ttcaacttgtcttcggtgtcaag

SEQ ID NO: 224 - RNA, 23 nt, synthetic construct
  source 1..23: mol_type = other RNA
  modified_base 1: mod_base = OTHER; note = 2'-O-methyl ribonucleotide
  modified_base 2: mod_base = OTHER; note = 2'-fluoro ribonucleotide
  modified_base 3..6: mod_base = OTHER; note = 2'-O-methyl ribonucleotide
  modified_base 7: mod_base = OTHER; note = 2'-fluoro ribonucleotide
  modified_base 8..11: mod_base = OTHER; note = 2'-O-methyl ribonucleotide
  modified_base 12: mod_base = OTHER; note = 2'-fluoro ribonucleotide
  modified_base 13: mod_base = OTHER; note = 2'-O-methyl ribonucleotide
  modified_base 14: mod_base = OTHER; note = 2'-fluoro ribonucleotide
  modified_base 15: mod_base = OTHER; note = 2'-O-methyl ribonucleotide
  modified_base 16: mod_base = OTHER; note = 2'-fluoro ribonucleotide
  modified_base 17..23: mod_base = OTHER; note = 2'-O-methyl ribonucleotide
  modified_base 1..3: mod_base = OTHER; note = phosphorothioate linkage
  modified_base 21..23: mod_base = OTHER; note = phosphorothioate linkage
tctcaacttgtcttcggtgtcaa

SEQ ID NO: 225 - RNA, 23 nt, synthetic construct
  source 1..23: mol_type = other RNA
  modified_base 1: mod_base = OTHER; note = 2'-O-methyl ribonucleotide
  modified_base 2: mod_base = OTHER; note = 2'-fluoro ribonucleotide
  modified_base 3..6: mod_base = OTHER; note = 2'-O-methyl ribonucleotide
  modified_base 7: mod_base = OTHER; note = 2'-fluoro ribonucleotide
  modified_base 8..11: mod_base = OTHER; note = 2'-O-methyl ribonucleotide
  modified_base 12: mod_base = OTHER; note = 2'-fluoro ribonucleotide
  modified_base 13: mod_base = OTHER; note = 2'-O-methyl ribonucleotide
  modified_base 14: mod_base = OTHER; note = 2'-fluoro ribonucleotide
  modified_base 15: mod_base = OTHER; note = 2'-O-methyl ribonucleotide
  modified_base 16: mod_base = OTHER; note = 2'-fluoro ribonucleotide
  modified_base 17..23: mod_base = OTHER; note = 2'-O-methyl ribonucleotide
  modified_base 1..3: mod_base = OTHER; note = phosphorothioate linkage
  modified_base 21..23: mod_base = OTHER; note = phosphorothioate linkage
ttgcggccctcaacttgtcttcg

SEQ ID NO: 226 - RNA, 23 nt, synthetic construct
  source 1..23: mol_type = other RNA
  modified_base 1: mod_base = OTHER; note = 2'-O-methyl ribonucleotide
  modified_base 2: mod_base = OTHER; note = 2'-fluoro ribonucleotide
  modified_base 3..6: mod_base = OTHER; note = 2'-O-methyl ribonucleotide
  modified_base 7: mod_base = OTHER; note = 2'-fluoro ribonucleotide
  modified_base 8..11: mod_base = OTHER; note = 2'-O-methyl ribonucleotide
  modified_base 12: mod_base = OTHER; note = 2'-fluoro ribonucleotide
  modified_base 13: mod_base = OTHER; note = 2'-O-methyl ribonucleotide
  modified_base 14: mod_base = OTHER; note = 2'-fluoro ribonucleotide
  modified_base 15: mod_base = OTHER; note = 2'-O-methyl ribonucleotide
  modified_base 16: mod_base = OTHER; note = 2'-fluoro ribonucleotide
  modified_base 17..23: mod_base = OTHER; note = 2'-O-methyl ribonucleotide
  modified_base 1..3: mod_base = OTHER; note = phosphorothioate linkage
  modified_base 21..23: mod_base = OTHER; note = phosphorothioate linkage
tttgcggccctcaacttgtcttc

SEQ ID NO: 227 - RNA, 23 nt, synthetic construct
  source 1..23: mol_type = other RNA
  modified_base 1: mod_base = OTHER; note = 2'-O-methyl ribonucleotide
  modified_base 2: mod_base = OTHER; note = 2'-fluoro ribonucleotide
  modified_base 3..6: mod_base = OTHER; note = 2'-O-methyl ribonucleotide
  modified_base 7: mod_base = OTHER; note = 2'-fluoro ribonucleotide
  modified_base 8..11: mod_base = OTHER; note = 2'-O-methyl ribonucleotide
  modified_base 12: mod_base = OTHER; note = 2'-fluoro ribonucleotide
  modified_base 13: mod_base = OTHER; note = 2'-O-methyl ribonucleotide
  modified_base 14: mod_base = OTHER; note = 2'-fluoro ribonucleotide
  modified_base 15: mod_base = OTHER; note = 2'-O-methyl ribonucleotide
  modified_base 16: mod_base = OTHER; note = 2'-fluoro ribonucleotide
  modified_base 17..23: mod_base = OTHER; note = 2'-O-methyl ribonucleotide
  modified_base 1..3: mod_base = OTHER; note = phosphorothioate linkage
  modified_base 21..23: mod_base = OTHER; note = phosphorothioate linkage
tatcccgaccattgcggccctca

SEQ ID NO: 228 - RNA, 23 nt, synthetic construct
  source 1..23: mol_type = other RNA
  modified_base 1: mod_base = OTHER; note = 2'-O-methyl ribonucleotide
  modified_base 2: mod_base = OTHER; note = 2'-fluoro ribonucleotide
  modified_base 3..6: mod_base = OTHER; note = 2'-O-methyl ribonucleotide
  modified_base 7: mod_base = OTHER; note = 2'-fluoro ribonucleotide
  modified_base 8..11: mod_base = OTHER; note = 2'-O-methyl ribonucleotide
  modified_base 12: mod_base = OTHER; note = 2'-fluoro ribonucleotide
  modified_base 13: mod_base = OTHER; note = 2'-O-methyl ribonucleotide
  modified_base 14: mod_base = OTHER; note = 2'-fluoro ribonucleotide
  modified_base 15: mod_base = OTHER; note = 2'-O-methyl ribonucleotide
  modified_base 16: mod_base = OTHER; note = 2'-fluoro ribonucleotide
  modified_base 17..23: mod_base = OTHER; note = 2'-O-methyl ribonucleotide
  modified_base 1..3: mod_base = OTHER; note = phosphorothioate linkage
  modified_base 21..23: mod_base = OTHER; note = phosphorothioate linkage
tagcatcccgaccattgcggccc

SEQ ID NO: 229 - RNA, 23 nt, synthetic construct
  source 1..23: mol_type = other RNA
  modified_base 1: mod_base = OTHER; note = 2'-O-methyl ribonucleotide
  modified_base 2: mod_base = OTHER; note = 2'-fluoro ribonucleotide
  modified_base 3..6: mod_base = OTHER; note = 2'-O-methyl ribonucleotide
  modified_base 7: mod_base = OTHER; note = 2'-fluoro ribonucleotide
  modified_base 8..11: mod_base = OTHER; note = 2'-O-methyl ribonucleotide
  modified_base 12: mod_base = OTHER; note = 2'-fluoro ribonucleotide
  modified_base 13: mod_base = OTHER; note = 2'-O-methyl ribonucleotide
  modified_base 14: mod_base = OTHER; note = 2'-fluoro ribonucleotide
  modified_base 15: mod_base = OTHER; note = 2'-O-methyl ribonucleotide
  modified_base 16: mod_base = OTHER; note = 2'-fluoro ribonucleotide
  modified_base 17..23: mod_base = OTHER; note = 2'-O-methyl ribonucleotide
  modified_base 1..3: mod_base = OTHER; note = phosphorothioate linkage
  modified_base 21..23: mod_base = OTHER; note = phosphorothioate linkage
ttggccagcatcccgaccattgc

SEQ ID NO: 230 - RNA, 23 nt, synthetic construct
  source 1..23: mol_type = other RNA
  modified_base 1: mod_base = OTHER; note = 2'-O-methyl ribonucleotide
  modified_base 2: mod_base = OTHER; note = 2'-fluoro ribonucleotide
  modified_base 3..6: mod_base = OTHER; note = 2'-O-methyl ribonucleotide
  modified_base 7: mod_base = OTHER; note = 2'-fluoro ribonucleotide
  modified_base 8..11: mod_base = OTHER; note = 2'-O-methyl ribonucleotide
  modified_base 12: mod_base = OTHER; note = 2'-fluoro ribonucleotide
  modified_base 13: mod_base = OTHER; note = 2'-O-methyl ribonucleotide
  modified_base 14: mod_base = OTHER; note = 2'-fluoro ribonucleotide
  modified_base 15: mod_base = OTHER; note = 2'-O-methyl ribonucleotide
  modified_base 16: mod_base = OTHER; note = 2'-fluoro ribonucleotide
  modified_base 17..23: mod_base = OTHER; note = 2'-O-methyl ribonucleotide
  modified_base 1..3: mod_base = OTHER; note = phosphorothioate linkage
  modified_base 21..23: mod_base = OTHER; note = phosphorothioate linkage
tttggccagcatcccgaccattg

SEQ ID NO: 231 - RNA, 23 nt, synthetic construct
  source 1..23: mol_type = other RNA
  modified_base 1: mod_base = OTHER; note = 2'-O-methyl ribonucleotide
  modified_base 2: mod_base = OTHER; note = 2'-fluoro ribonucleotide
  modified_base 3..6: mod_base = OTHER; note = 2'-O-methyl ribonucleotide
  modified_base 7: mod_base = OTHER; note = 2'-fluoro ribonucleotide
  modified_base 8..11: mod_base = OTHER; note = 2'-O-methyl ribonucleotide
  modified_base 12: mod_base = OTHER; note = 2'-fluoro ribonucleotide
  modified_base 13: mod_base = OTHER; note = 2'-O-methyl ribonucleotide
  modified_base 14: mod_base = OTHER; note = 2'-fluoro ribonucleotide
  modified_base 15: mod_base = OTHER; note = 2'-O-methyl ribonucleotide
  modified_base 16: mod_base = OTHER; note = 2'-fluoro ribonucleotide
  modified_base 17..23: mod_base = OTHER; note = 2'-O-methyl ribonucleotide
  modified_base 1..3: mod_base = OTHER; note = phosphorothioate linkage
  modified_base 21..23: mod_base = OTHER; note = phosphorothioate linkage
tacggaagcccaagaagttggcc

SEQ ID NO: 232 - RNA, 23 nt, synthetic construct
  source 1..23: mol_type = other RNA
  modified_base 1: mod_base = OTHER; note = 2'-O-methyl ribonucleotide
  modified_base 2: mod_base = OTHER; note = 2'-fluoro ribonucleotide
  modified_base 3..6: mod_base = OTHER; note = 2'-O-methyl ribonucleotide
  modified_base 7: mod_base = OTHER; note = 2'-fluoro ribonucleotide
  modified_base 8..11: mod_base = OTHER; note = 2'-O-methyl ribonucleotide
  modified_base 12: mod_base = OTHER; note = 2'-fluoro ribonucleotide
  modified_base 13: mod_base = OTHER; note = 2'-O-methyl ribonucleotide
  modified_base 14: mod_base = OTHER; note = 2'-fluoro ribonucleotide
  modified_base 15: mod_base = OTHER; note = 2'-O-methyl ribonucleotide
  modified_base 16: mod_base = OTHER; note = 2'-fluoro ribonucleotide
  modified_base 17..23: mod_base = OTHER; note = 2'-O-methyl ribonucleotide
  modified_base 1..3: mod_base = OTHER; note = phosphorothioate linkage
  modified_base 21..23: mod_base = OTHER; note = phosphorothioate linkage
ttacggaagcccaagaagttggc

SEQ ID NO: 233 - RNA, 23 nt, synthetic construct
  source 1..23: mol_type = other RNA
  modified_base 1: mod_base = OTHER; note = 2'-O-methyl ribonucleotide
  modified_base 2: mod_base = OTHER; note = 2'-fluoro ribonucleotide
  modified_base 3..6: mod_base = OTHER; note = 2'-O-methyl ribonucleotide
  modified_base 7: mod_base = OTHER; note = 2'-fluoro ribonucleotide
  modified_base 8..11: mod_base = OTHER; note = 2'-O-methyl ribonucleotide
  modified_base 12: mod_base = OTHER; note = 2'-fluoro ribonucleotide
  modified_base 13: mod_base = OTHER; note = 2'-O-methyl ribonucleotide
  modified_base 14: mod_base = OTHER; note = 2'-fluoro ribonucleotide
  modified_base 15: mod_base = OTHER; note = 2'-O-methyl ribonucleotide
  modified_base 16: mod_base = OTHER; note = 2'-fluoro ribonucleotide
  modified_base 17..23: mod_base = OTHER; note = 2'-O-methyl ribonucleotide
  modified_base 1..3: mod_base = OTHER; note = phosphorothioate linkage
  modified_base 21..23: mod_base = OTHER; note = phosphorothioate linkage
tatacggaagcccaagaagttgg

SEQ ID NO: 234 - RNA, 23 nt, synthetic construct
  source 1..23: mol_type = other RNA
  modified_base 1: mod_base = OTHER; note = 2'-O-methyl ribonucleotide
  modified_base 2: mod_base = OTHER; note = 2'-fluoro ribonucleotide
  modified_base 3..6: mod_base = OTHER; note = 2'-O-methyl ribonucleotide
  modified_base 7: mod_base = OTHER; note = 2'-fluoro ribonucleotide
  modified_base 8..11: mod_base = OTHER; note = 2'-O-methyl ribonucleotide
  modified_base 12: mod_base = OTHER; note = 2'-fluoro ribonucleotide
  modified_base 13: mod_base = OTHER; note = 2'-O-methyl ribonucleotide
  modified_base 14: mod_base = OTHER; note = 2'-fluoro ribonucleotide
  modified_base 15: mod_base = OTHER; note = 2'-O-methyl ribonucleotide
  modified_base 16: mod_base = OTHER; note = 2'-fluoro ribonucleotide
  modified_base 17..23: mod_base = OTHER; note = 2'-O-methyl ribonucleotide
  modified_base 1..3: mod_base = OTHER; note = phosphorothioate linkage
  modified_base 21..23: mod_base = OTHER; note = phosphorothioate linkage
tatatacggaagcccaagaagtt

SEQ ID NO: 235 - RNA, 23 nt, synthetic construct
  source 1..23: mol_type = other RNA
  modified_base 1: mod_base = OTHER; note = 2'-O-methyl ribonucleotide
  modified_base 2: mod_base = OTHER; note = 2'-fluoro ribonucleotide
  modified_base 3..6: mod_base = OTHER; note = 2'-O-methyl ribonucleotide
  modified_base 7: mod_base = OTHER; note = 2'-fluoro ribonucleotide
  modified_base 8..11: mod_base = OTHER; note = 2'-O-methyl ribonucleotide
  modified_base 12: mod_base = OTHER; note = 2'-fluoro ribonucleotide
  modified_base 13: mod_base = OTHER; note = 2'-O-methyl ribonucleotide
  modified_base 14: mod_base = OTHER; note = 2'-fluoro ribonucleotide
  modified_base 15: mod_base = OTHER; note = 2'-O-methyl ribonucleotide
  modified_base 16: mod_base = OTHER; note = 2'-fluoro ribonucleotide
  modified_base 17..23: mod_base = OTHER; note = 2'-O-methyl ribonucleotide
  modified_base 1..3: mod_base = OTHER; note = phosphorothioate linkage
  modified_base 21..23: mod_base = OTHER; note = phosphorothioate linkage
ttatatacggaagcccaagaagt

SEQ ID NO: 236 - RNA, 23 nt, synthetic construct
  source 1..23: mol_type = other RNA
  modified_base 1: mod_base = OTHER; note = 2'-O-methyl ribonucleotide
  modified_base 2: mod_base = OTHER; note = 2'-fluoro ribonucleotide
  modified_base 3..6: mod_base = OTHER; note = 2'-O-methyl ribonucleotide
  modified_base 7: mod_base = OTHER; note = 2'-fluoro ribonucleotide
  modified_base 8..11: mod_base = OTHER; note = 2'-O-methyl ribonucleotide
  modified_base 12: mod_base = OTHER; note = 2'-fluoro ribonucleotide
  modified_base 13: mod_base = OTHER; note = 2'-O-methyl ribonucleotide
  modified_base 14: mod_base = OTHER; note = 2'-fluoro ribonucleotide
  modified_base 15: mod_base = OTHER; note = 2'-O-methyl ribonucleotide
  modified_base 16: mod_base = OTHER; note = 2'-fluoro ribonucleotide
  modified_base 17..23: mod_base = OTHER; note = 2'-O-methyl ribonucleotide
  modified_base 1..3: mod_base = OTHER; note = phosphorothioate linkage
  modified_base 21..23: mod_base = OTHER; note = phosphorothioate linkage
tatatatacggaagcccaagaag

SEQ ID NO: 237 - RNA, 23 nt, synthetic construct
  source 1..23: mol_type = other RNA
  modified_base 1: mod_base = OTHER; note = 2'-O-methyl ribonucleotide
  modified_base 2: mod_base = OTHER; note = 2'-fluoro ribonucleotide
  modified_base 3..6: mod_base = OTHER; note = 2'-O-methyl ribonucleotide
  modified_base 7: mod_base = OTHER; note = 2'-fluoro ribonucleotide
  modified_base 8..11: mod_base = OTHER; note = 2'-O-methyl ribonucleotide
  modified_base 12: mod_base = OTHER; note = 2'-fluoro ribonucleotide
  modified_base 13: mod_base = OTHER; note = 2'-O-methyl ribonucleotide
  modified_base 14: mod_base = OTHER; note = 2'-fluoro ribonucleotide
  modified_base 15: mod_base = OTHER; note = 2'-O-methyl ribonucleotide
  modified_base 16: mod_base = OTHER; note = 2'-fluoro ribonucleotide
  modified_base 17..23: mod_base = OTHER; note = 2'-O-methyl ribonucleotide
  modified_base 1..3: mod_base = OTHER; note = phosphorothioate linkage
  modified_base 21..23: mod_base = OTHER; note = phosphorothioate linkage
tcatatatacggaagcccaagaa

SEQ ID NO: 238 - RNA, 23 nt, synthetic construct
  source 1..23: mol_type = other RNA
  modified_base 1: mod_base = OTHER; note = 2'-O-methyl ribonucleotide
  modified_base 2: mod_base = OTHER; note = 2'-fluoro ribonucleotide
  modified_base 3..6: mod_base = OTHER; note = 2'-O-methyl ribonucleotide
  modified_base 7: mod_base = OTHER; note = 2'-fluoro ribonucleotide
  modified_base 8..11: mod_base = OTHER; note = 2'-O-methyl ribonucleotide
  modified_base 12: mod_base = OTHER; note = 2'-fluoro ribonucleotide
  modified_base 13: mod_base = OTHER; note = 2'-O-methyl ribonucleotide
  modified_base 14: mod_base = OTHER; note = 2'-fluoro ribonucleotide
  modified_base 15: mod_base = OTHER; note = 2'-O-methyl ribonucleotide
  modified_base 16: mod_base = OTHER; note = 2'-fluoro ribonucleotide
  modified_base 17..23: mod_base = OTHER; note = 2'-O-methyl ribonucleotide
  modified_base 1..3: mod_base = OTHER; note = phosphorothioate linkage
  modified_base 21..23: mod_base = OTHER; note = phosphorothioate linkage
tccatatatacggaagcccaaga

SEQ ID NO: 239 - RNA, 23 nt, synthetic construct
  source 1..23: mol_type = other RNA
  modified_base 1: mod_base = OTHER; note = 2'-O-methyl ribonucleotide
  modified_base 2: mod_base = OTHER; note = 2'-fluoro ribonucleotide
  modified_base 3..6: mod_base = OTHER; note = 2'-O-methyl ribonucleotide
  modified_base 7: mod_base = OTHER; note = 2'-fluoro ribonucleotide
  modified_base 8..11: mod_base = OTHER; note = 2'-O-methyl ribonucleotide
  modified_base 12: mod_base = OTHER; note = 2'-fluoro ribonucleotide
  modified_base 13: mod_base = OTHER; note = 2'-O-methyl ribonucleotide
  modified_base 14: mod_base = OTHER; note = 2'-fluoro ribonucleotide
  modified_base 15: mod_base = OTHER; note = 2'-O-methyl ribonucleotide
  modified_base 16: mod_base = OTHER; note = 2'-fluoro ribonucleotide
  modified_base 17..23: mod_base = OTHER; note = 2'-O-methyl ribonucleotide
  modified_base 1..3: mod_base = OTHER; note = phosphorothioate linkage
  modified_base 21..23: mod_base = OTHER; note = phosphorothioate linkage
ttgccatatatacggaagcccaa

SEQ ID NO: 240 - RNA, 23 nt, synthetic construct
  source 1..23: mol_type = other RNA
  modified_base 1: mod_base = OTHER; note = 2'-O-methyl ribonucleotide
  modified_base 2: mod_base = OTHER; note = 2'-fluoro ribonucleotide
  modified_base 3..6: mod_base = OTHER; note = 2'-O-methyl ribonucleotide
  modified_base 7: mod_base = OTHER; note = 2'-fluoro ribonucleotide
  modified_base 8..11: mod_base = OTHER; note = 2'-O-methyl ribonucleotide
  modified_base 12: mod_base = OTHER; note = 2'-fluoro ribonucleotide
  modified_base 13: mod_base = OTHER; note = 2'-O-methyl ribonucleotide
  modified_base 14: mod_base = OTHER; note = 2'-fluoro ribonucleotide
  modified_base 15: mod_base = OTHER; note = 2'-O-methyl ribonucleotide
  modified_base 16: mod_base = OTHER; note = 2'-fluoro ribonucleotide
  modified_base 17..23: mod_base = OTHER; note = 2'-O-methyl ribonucleotide
  modified_base 1..3: mod_base = OTHER; note = phosphorothioate linkage
  modified_base 21..23: mod_base = OTHER; note = phosphorothioate linkage
tatgccatatatacggaagccca

SEQ ID NO: 241 - RNA, 23 nt, synthetic construct
  source 1..23: mol_type = other RNA
  modified_base 1: mod_base = OTHER; note = 2'-O-methyl ribonucleotide
  modified_base 2: mod_base = OTHER; note = 2'-fluoro ribonucleotide
  modified_base 3..6: mod_base = OTHER; note = 2'-O-methyl ribonucleotide
  modified_base 7: mod_base = OTHER; note = 2'-fluoro ribonucleotide
  modified_base 8..11: mod_base = OTHER; note = 2'-O-methyl ribonucleotide
  modified_base 12: mod_base = OTHER; note = 2'-fluoro ribonucleotide
  modified_base 13: mod_base = OTHER; note = 2'-O-methyl ribonucleotide
  modified_base 14: mod_base = OTHER; note = 2'-fluoro ribonucleotide
  modified_base 15: mod_base = OTHER; note = 2'-O-methyl ribonucleotide
  modified_base 16: mod_base = OTHER; note = 2'-fluoro ribonucleotide
  modified_base 17..23: mod_base = OTHER; note = 2'-O-methyl ribonucleotide
  modified_base 1..3: mod_base = OTHER; note = phosphorothioate linkage
  modified_base 21..23: mod_base = OTHER; note = phosphorothioate linkage
tgcatgccatatatacggaagcc

SEQ ID NO: 242 - RNA, 23 nt, synthetic construct
  source 1..23: mol_type = other RNA
  modified_base 1: mod_base = OTHER; note = 2'-O-methyl ribonucleotide
  modified_base 2: mod_base = OTHER; note = 2'-fluoro ribonucleotide
  modified_base 3..6: mod_base = OTHER; note = 2'-O-methyl ribonucleotide
  modified_base 7: mod_base = OTHER; note = 2'-fluoro ribonucleotide
  modified_base 8..11: mod_base = OTHER; note = 2'-O-methyl ribonucleotide
  modified_base 12: mod_base = OTHER; note = 2'-fluoro ribonucleotide
  modified_base 13: mod_base = OTHER; note = 2'-O-methyl ribonucleotide
  modified_base 14: mod_base = OTHER; note = 2'-fluoro ribonucleotide
  modified_base 15: mod_base = OTHER; note = 2'-O-methyl ribonucleotide
  modified_base 16: mod_base = OTHER; note = 2'-fluoro ribonucleotide
  modified_base 17..23: mod_base = OTHER; note = 2'-O-methyl ribonucleotide
  modified_base 1..3: mod_base = OTHER; note = phosphorothioate linkage
  modified_base 21..23: mod_base = OTHER; note = phosphorothioate linkage
ttgcatgccatatatacggaagc

SEQ ID NO: 243 - RNA, 23 nt, synthetic construct
  source 1..23: mol_type = other RNA
  modified_base 1: mod_base = OTHER; note = 2'-O-methyl ribonucleotide
  modified_base 2: mod_base = OTHER; note = 2'-fluoro ribonucleotide
  modified_base 3..6: mod_base = OTHER; note = 2'-O-methyl ribonucleotide
  modified_base 7: mod_base = OTHER; note = 2'-fluoro ribonucleotide
  modified_base 8..11: mod_base = OTHER; note = 2'-O-methyl ribonucleotide
  modified_base 12: mod_base = OTHER; note = 2'-fluoro ribonucleotide
  modified_base 13: mod_base = OTHER; note = 2'-O-methyl ribonucleotide
  modified_base 14: mod_base = OTHER; note = 2'-fluoro ribonucleotide
  modified_base 15: mod_base = OTHER; note = 2'-O-methyl ribonucleotide
  modified_base 16: mod_base = OTHER; note = 2'-fluoro ribonucleotide
  modified_base 17..23: mod_base = OTHER; note = 2'-O-methyl ribonucleotide
  modified_base 1..3: mod_base = OTHER; note = phosphorothioate linkage
  modified_base 21..23: mod_base = OTHER; note = phosphorothioate linkage
tgtgcatgccatatatacggaag

SEQ ID NO: 244 - RNA, 23 nt, synthetic construct
  source 1..23: mol_type = other RNA
  modified_base 1: mod_base = OTHER; note = 2'-O-methyl ribonucleotide
  modified_base 2: mod_base = OTHER; note = 2'-fluoro ribonucleotide
  modified_base 3..6: mod_base = OTHER; note = 2'-O-methyl ribonucleotide
  modified_base 7: mod_base = OTHER; note = 2'-fluoro ribonucleotide
  modified_base 8..11: mod_base = OTHER; note = 2'-O-methyl ribonucleotide
  modified_base 12: mod_base = OTHER; note = 2'-fluoro ribonucleotide
  modified_base 13: mod_base = OTHER; note = 2'-O-methyl ribonucleotide
  modified_base 14: mod_base = OTHER; note = 2'-fluoro ribonucleotide
  modified_base 15: mod_base = OTHER; note = 2'-O-methyl ribonucleotide
  modified_base 16: mod_base = OTHER; note = 2'-fluoro ribonucleotide
  modified_base 17..23: mod_base = OTHER; note = 2'-O-methyl ribonucleotide
  modified_base 1..3: mod_base = OTHER; note = phosphorothioate linkage
  modified_base 21..23: mod_base = OTHER; note = phosphorothioate linkage
tactgtgcatgccatatatacgg

SEQ ID NO: 245 - RNA, 23 nt, synthetic construct
  source 1..23: mol_type = other RNA
  modified_base 1: mod_base = OTHER; note = 2'-O-methyl ribonucleotide
  modified_base 2: mod_base = OTHER; note = 2'-fluoro ribonucleotide
  modified_base 3..6: mod_base = OTHER; note = 2'-O-methyl ribonucleotide
  modified_base 7: mod_base = OTHER; note = 2'-fluoro ribonucleotide
  modified_base 8..11: mod_base = OTHER; note = 2'-O-methyl ribonucleotide
  modified_base 12: mod_base = OTHER; note = 2'-fluoro ribonucleotide
  modified_base 13: mod_base = OTHER; note = 2'-O-methyl ribonucleotide
  modified_base 14: mod_base = OTHER; note = 2'-fluoro ribonucleotide
  modified_base 15: mod_base = OTHER; note = 2'-O-methyl ribonucleotide
  modified_base 16: mod_base = OTHER; note = 2'-fluoro ribonucleotide
  modified_base 17..23: mod_base = OTHER; note = 2'-O-methyl ribonucleotide
  modified_base 1..3: mod_base = OTHER; note = phosphorothioate linkage
  modified_base 21..23: mod_base = OTHER; note = phosphorothioate linkage
tgctcactgtgcatgccatatat

SEQ ID NO: 246 - RNA, 23 nt, synthetic construct
  source 1..23: mol_type = other RNA
  modified_base 1: mod_base = OTHER; note = 2'-O-methyl ribonucleotide
  modified_base 2: mod_base = OTHER; note = 2'-fluoro ribonucleotide
  modified_base 3..6: mod_base = OTHER; note = 2'-O-methyl ribonucleotide
  modified_base 7: mod_base = OTHER; note = 2'-fluoro ribonucleotide
  modified_base 8..11: mod_base = OTHER; note = 2'-O-methyl ribonucleotide
  modified_base 12: mod_base = OTHER; note = 2'-fluoro ribonucleotide
  modified_base 13: mod_base = OTHER; note = 2'-O-methyl ribonucleotide
  modified_base 14: mod_base = OTHER; note = 2'-fluoro ribonucleotide
  modified_base 15: mod_base = OTHER; note = 2'-O-methyl ribonucleotide
  modified_base 16: mod_base = OTHER; note = 2'-fluoro ribonucleotide
  modified_base 17..23: mod_base = OTHER; note = 2'-O-methyl ribonucleotide
  modified_base 1..3: mod_base = OTHER; note = phosphorothioate linkage
  modified_base 21..23: mod_base = OTHER; note = phosphorothioate linkage
ttagctcactgtgcatgccatat

SEQ ID NO: 247 - RNA, 23 nt, synthetic construct
  source 1..23: mol_type = other RNA
  modified_base 1: mod_base = OTHER; note = 2'-O-methyl ribonucleotide
  modified_base 2: mod_base = OTHER; note = 2'-fluoro ribonucleotide
  modified_base 3..6: mod_base = OTHER; note = 2'-O-methyl ribonucleotide
  modified_base 7: mod_base = OTHER; note = 2'-fluoro ribonucleotide
  modified_base 8..11: mod_base = OTHER; note = 2'-O-methyl ribonucleotide
  modified_base 12: mod_base = OTHER; note = 2'-fluoro ribonucleotide
  modified_base 13: mod_base = OTHER; note = 2'-O-methyl ribonucleotide
  modified_base 14: mod_base = OTHER; note = 2'-fluoro ribonucleotide
  modified_base 15: mod_base = OTHER; note = 2'-O-methyl ribonucleotide
  modified_base 16: mod_base = OTHER; note = 2'-fluoro ribonucleotide
  modified_base 17..23: mod_base = OTHER; note = 2'-O-methyl ribonucleotide
  modified_base 1..3: mod_base = OTHER; note = phosphorothioate linkage
  modified_base 21..23: mod_base = OTHER; note = phosphorothioate linkage
tatagctcactgtgcatgccata

SEQ ID NO: 248 - RNA, 23 nt, synthetic construct
  source 1..23: mol_type = other RNA
  modified_base 1: mod_base = OTHER; note = 2'-O-methyl ribonucleotide
  modified_base 2: mod_base = OTHER; note = 2'-fluoro ribonucleotide
  modified_base 3..6: mod_base = OTHER; note = 2'-O-methyl ribonucleotide
  modified_base 7: mod_base = OTHER; note = 2'-fluoro ribonucleotide
  modified_base 8..11: mod_base = OTHER; note = 2'-O-methyl ribonucleotide
  modified_base 12: mod_base = OTHER; note = 2'-fluoro ribonucleotide
  modified_base 13: mod_base = OTHER; note = 2'-O-methyl ribonucleotide
  modified_base 14: mod_base = OTHER; note = 2'-fluoro ribonucleotide
  modified_base 15: mod_base = OTHER; note = 2'-O-methyl ribonucleotide
  modified_base 16: mod_base = OTHER; note = 2'-fluoro ribonucleotide
  modified_base 17..23: mod_base = OTHER; note = 2'-O-methyl ribonucleotide
  modified_base 1..3: mod_base = OTHER; note = phosphorothioate linkage
  modified_base 21..23: mod_base = OTHER; note = phosphorothioate linkage
tacgccccatagctcactgtgca

SEQ ID NO: 249 - RNA, 23 nt, synthetic construct
  source 1..23: mol_type = other RNA
  modified_base 1: mod_base = OTHER; note = 2'-O-methyl ribonucleotide
  modified_base 2: mod_base = OTHER; note = 2'-fluoro ribonucleotide
  modified_base 3..6: mod_base = OTHER; note = 2'-O-methyl ribonucleotide
  modified_base 7: mod_base = OTHER; note = 2'-fluoro ribonucleotide
  modified_base 8..11: mod_base = OTHER; note = 2'-O-methyl ribonucleotide
  modified_base 12: mod_base = OTHER; note = 2'-fluoro ribonucleotide
  modified_base 13: mod_base = OTHER; note = 2'-O-methyl ribonucleotide
  modified_base 14: mod_base = OTHER; note = 2'-fluoro ribonucleotide
  modified_base 15: mod_base = OTHER; note = 2'-O-methyl ribonucleotide
  modified_base 16: mod_base = OTHER; note = 2'-fluoro ribonucleotide
  modified_base 17..23: mod_base = OTHER; note = 2'-O-methyl ribonucleotide
  modified_base 1..3: mod_base = OTHER; note = phosphorothioate linkage
  modified_base 21..23: mod_base = OTHER; note = phosphorothioate linkage
tcacgccccatagctcactgtgc

SEQ ID NO: 250 - RNA, 23 nt, synthetic construct
  source 1..23: mol_type = other RNA
  modified_base 1: mod_base = OTHER; note = 2'-O-methyl ribonucleotide
  modified_base 2: mod_base = OTHER; note = 2'-fluoro ribonucleotide
  modified_base 3..6: mod_base = OTHER; note = 2'-O-methyl ribonucleotide
  modified_base 7: mod_base = OTHER; note = 2'-fluoro ribonucleotide
  modified_base 8..11: mod_base = OTHER; note = 2'-O-methyl ribonucleotide
  modified_base 12: mod_base = OTHER; note = 2'-fluoro ribonucleotide
  modified_base 13: mod_base = OTHER; note = 2'-O-methyl ribonucleotide
  modified_base 14: mod_base = OTHER; note = 2'-fluoro ribonucleotide
  modified_base 15: mod_base = OTHER; note = 2'-O-methyl ribonucleotide
  modified_base 16: mod_base = OTHER; note = 2'-fluoro ribonucleotide
  modified_base 17..23: mod_base = OTHER; note = 2'-O-methyl ribonucleotide
  modified_base 1..3: mod_base = OTHER; note = phosphorothioate linkage
  modified_base 21..23: mod_base = OTHER; note = phosphorothioate linkage
tccacgccccatagctcactgtg

SEQ ID NO: 251 - RNA, 23 nt, synthetic construct
  source 1..23: mol_type = other RNA
  modified_base 1: mod_base = OTHER; note = 2'-O-methyl ribonucleotide
  modified_base 2: mod_base = OTHER; note = 2'-fluoro ribonucleotide
  modified_base 3..6: mod_base = OTHER; note = 2'-O-methyl ribonucleotide
  modified_base 7: mod_base = OTHER; note = 2'-fluoro ribonucleotide
  modified_base 8..11: mod_base = OTHER; note = 2'-O-methyl ribonucleotide
  modified_base 12: mod_base = OTHER; note = 2'-fluoro ribonucleotide
  modified_base 13: mod_base = OTHER; note = 2'-O-methyl ribonucleotide
  modified_base 14: mod_base = OTHER; note = 2'-fluoro ribonucleotide
  modified_base 15: mod_base = OTHER; note = 2'-O-methyl ribonucleotide
  modified_base 16: mod_base = OTHER; note = 2'-fluoro ribonucleotide
  modified_base 17..23: mod_base = OTHER; note = 2'-O-methyl ribonucleotide
  modified_base 1..3: mod_base = OTHER; note = phosphorothioate linkage
  modified_base 21..23: mod_base = OTHER; note = phosphorothioate linkage
tgaccacgccccatagctcactg

SEQ ID NO: 252 - RNA, 23 nt, synthetic construct
  source 1..23: mol_type = other RNA
  modified_base 1: mod_base = OTHER; note = 2'-O-methyl ribonucleotide
  modified_base 2: mod_base = OTHER; note = 2'-fluoro ribonucleotide
  modified_base 3..6: mod_base = OTHER; note = 2'-O-methyl ribonucleotide
  modified_base 7: mod_base = OTHER; note = 2'-fluoro ribonucleotide
  modified_base 8..11: mod_base = OTHER; note = 2'-O-methyl ribonucleotide
  modified_base 12: mod_base = OTHER; note = 2'-fluoro ribonucleotide
  modified_base 13: mod_base = OTHER; note = 2'-O-methyl ribonucleotide
  modified_base 14: mod_base = OTHER; note = 2'-fluoro ribonucleotide
  modified_base 15: mod_base = OTHER; note = 2'-O-methyl ribonucleotide
  modified_base 16: mod_base = OTHER; note = 2'-fluoro ribonucleotide
  modified_base 17..23: mod_base = OTHER; note = 2'-O-methyl ribonucleotide
  modified_base 1..3: mod_base = OTHER; note = phosphorothioate linkage
  modified_base 21..23: mod_base = OTHER; note = phosphorothioate linkage
tggaccacgccccatagctcact

SEQ ID NO: 253 - RNA, 23 nt, synthetic construct
  source 1..23: mol_type = other RNA
  modified_base 1: mod_base = OTHER; note = 2'-O-methyl ribonucleotide
  modified_base 2: mod_base = OTHER; note = 2'-fluoro ribonucleotide
  modified_base 3..6: mod_base = OTHER; note = 2'-O-methyl ribonucleotide
  modified_base 7: mod_base = OTHER; note = 2'-fluoro ribonucleotide
  modified_base 8..11: mod_base = OTHER; note = 2'-O-methyl ribonucleotide
  modified_base 12: mod_base = OTHER; note = 2'-fluoro ribonucleotide
  modified_base 13: mod_base = OTHER; note = 2'-O-methyl ribonucleotide
  modified_base 14: mod_base = OTHER; note = 2'-fluoro ribonucleotide
  modified_base 15: mod_base = OTHER; note = 2'-O-methyl ribonucleotide
  modified_base 16: mod_base = OTHER; note = 2'-fluoro ribonucleotide
  modified_base 17..23: mod_base = OTHER; note = 2'-O-methyl ribonucleotide
  modified_base 1..3: mod_base = OTHER; note = phosphorothioate linkage
  modified_base 21..23: mod_base = OTHER; note = phosphorothioate linkage
ttggaccacgccccatagctcac

SEQ ID NO: 254 - RNA, 23 nt, synthetic construct
  source 1..23: mol_type = other RNA
  modified_base 1: mod_base = OTHER; note = 2'-O-methyl ribonucleotide
  modified_base 2: mod_base = OTHER; note = 2'-fluoro ribonucleotide
  modified_base 3..6: mod_base = OTHER; note = 2'-O-methyl ribonucleotide
  modified_base 7: mod_base = OTHER; note = 2'-fluoro ribonucleotide
  modified_base 8..11: mod_base = OTHER; note = 2'-O-methyl ribonucleotide
  modified_base 12: mod_base = OTHER; note = 2'-fluoro ribonucleotide
  modified_base 13: mod_base = OTHER; note = 2'-O-methyl ribonucleotide
  modified_base 14: mod_base = OTHER; note = 2'-fluoro ribonucleotide
  modified_base 15: mod_base = OTHER; note = 2'-O-methyl ribonucleotide
  modified_base 16: mod_base = OTHER; note = 2'-fluoro ribonucleotide
  modified_base 17..23: mod_base = OTHER; note = 2'-O-methyl ribonucleotide
  modified_base 1..3: mod_base = OTHER; note = phosphorothioate linkage
  modified_base 21..23: mod_base = OTHER; note = phosphorothioate linkage
tccatggaccacgccccatagct

SEQ ID NO: 255 - RNA, 23 nt, synthetic construct
  source 1..23: mol_type = other RNA
  modified_base 1: mod_base = OTHER; note = 2'-O-methyl ribonucleotide
  modified_base 2: mod_base = OTHER; note = 2'-fluoro ribonucleotide
  modified_base 3..6: mod_base = OTHER; note = 2'-O-methyl ribonucleotide
  modified_base 7: mod_base = OTHER; note = 2'-fluoro ribonucleotide
  modified_base 8..11: mod_base = OTHER; note = 2'-O-methyl ribonucleotide
  modified_base 12: mod_base = OTHER; note = 2'-fluoro ribonucleotide
  modified_base 13: mod_base = OTHER; note = 2'-O-methyl ribonucleotide
  modified_base 14: mod_base = OTHER; note = 2'-fluoro ribonucleotide
  modified_base 15: mod_base = OTHER; note = 2'-O-methyl ribonucleotide
  modified_base 16: mod_base = OTHER; note = 2'-fluoro ribonucleotide
  modified_base 17..23: mod_base = OTHER; note = 2'-O-methyl ribonucleotide
  modified_base 1..3: mod_base = OTHER; note = phosphorothioate linkage
  modified_base 21..23: mod_base = OTHER; note = phosphorothioate linkage
tcggtggccccatggaccacgcc

SEQ ID NO: 256 - RNA, 23 nt, synthetic construct
  source 1..23: mol_type = other RNA
  modified_base 1: mod_base = OTHER; note = 2'-O-methyl ribonucleotide
  modified_base 2: mod_base = OTHER; note = 2'-fluoro ribonucleotide
  modified_base 3..6: mod_base = OTHER; note = 2'-O-methyl ribonucleotide
  modified_base 7: mod_base = OTHER; note = 2'-fluoro ribonucleotide
  modified_base 8..11: mod_base = OTHER; note = 2'-O-methyl ribonucleotide
  modified_base 12: mod_base = OTHER; note = 2'-fluoro ribonucleotide
  modified_base 13: mod_base = OTHER; note = 2'-O-methyl ribonucleotide
  modified_base 14: mod_base = OTHER; note = 2'-fluoro ribonucleotide
  modified_base 15: mod_base = OTHER; note = 2'-O-methyl ribonucleotide
  modified_base 16: mod_base = OTHER; note = 2'-fluoro ribonucleotide
  modified_base 17..23: mod_base = OTHER; note = 2'-O-methyl ribonucleotide
  modified_base 1..3: mod_base = OTHER; note = phosphorothioate linkage
  modified_base 21..23: mod_base = OTHER; note = phosphorothioate linkage
tgccaaagacagccgttggggag

SEQ ID NO: 257 - RNA, 23 nt, synthetic construct
  source 1..23: mol_type = other RNA
  modified_base 1: mod_base = OTHER; note = 2'-O-methyl ribonucleotide
  modified_base 2: mod_base = OTHER; note = 2'-fluoro ribonucleotide
  modified_base 3..6: mod_base = OTHER; note = 2'-O-methyl ribonucleotide
  modified_base 7: mod_base = OTHER; note = 2'-fluoro ribonucleotide
  modified_base 8..11: mod_base = OTHER; note = 2'-O-methyl ribonucleotide
  modified_base 12: mod_base = OTHER; note = 2'-fluoro ribonucleotide
  modified_base 13: mod_base = OTHER; note = 2'-O-methyl ribonucleotide
  modified_base 14: mod_base = OTHER; note = 2'-fluoro ribonucleotide
  modified_base 15: mod_base = OTHER; note = 2'-O-methyl ribonucleotide
  modified_base 16: mod_base = OTHER; note = 2'-fluoro ribonucleotide
  modified_base 17..23: mod_base = OTHER; note = 2'-O-methyl ribonucleotide
  modified_base 1..3: mod_base = OTHER; note = phosphorothioate linkage
  modified_base 21..23: mod_base = OTHER; note = phosphorothioate linkage
tggtgccaaagacagccgttggg

SEQ ID NO: 258 - RNA, 23 nt, synthetic construct
  source 1..23: mol_type = other RNA
  modified_base 1: mod_base = OTHER; note = 2'-O-methyl ribonucleotide
  modified_base 2: mod_base = OTHER; note = 2'-fluoro ribonucleotide
  modified_base 3..6: mod_base = OTHER; note = 2'-O-methyl ribonucleotide
  modified_base 7: mod_base = OTHER; note = 2'-fluoro ribonucleotide
  modified_base 8..11: mod_base = OTHER; note = 2'-O-methyl ribonucleotide
  modified_base 12: mod_base = OTHER; note = 2'-fluoro ribonucleotide
  modified_base 13: mod_base = OTHER; note = 2'-O-methyl ribonucleotide
  modified_base 14: mod_base = OTHER; note = 2'-fluoro ribonucleotide
  modified_base 15: mod_base = OTHER; note = 2'-O-methyl ribonucleotide
  modified_base 16: mod_base = OTHER; note = 2'-fluoro ribonucleotide
  modified_base 17..23: mod_base = OTHER; note = 2'-O-methyl ribonucleotide
  modified_base 1..3: mod_base = OTHER; note = phosphorothioate linkage
  modified_base 21..23: mod_base = OTHER; note = phosphorothioate linkage
tgggtgccaaagacagccgttgg

SEQ ID NO: 259 - RNA, 23 nt, synthetic construct
  source 1..23: mol_type = other RNA
  modified_base 1: mod_base = OTHER; note = 2'-O-methyl ribonucleotide
  modified_base 2: mod_base = OTHER; note = 2'-fluoro ribonucleotide
  modified_base 3..6: mod_base = OTHER; note = 2'-O-methyl ribonucleotide
  modified_base 7: mod_base = OTHER; note = 2'-fluoro ribonucleotide
  modified_base 8..11: mod_base = OTHER; note = 2'-O-methyl ribonucleotide
  modified_base 12: mod_base = OTHER; note = 2'-fluoro ribonucleotide
  modified_base 13: mod_base = OTHER; note = 2'-O-methyl ribonucleotide
  modified_base 14: mod_base = OTHER; note = 2'-fluoro ribonucleotide
  modified_base 15: mod_base = OTHER; note = 2'-O-methyl ribonucleotide
  modified_base 16: mod_base = OTHER; note = 2'-fluoro ribonucleotide
  modified_base 17..23: mod_base = OTHER; note = 2'-O-methyl ribonucleotide
  modified_base 1..3: mod_base = OTHER; note = phosphorothioate linkage
  modified_base 21..23: mod_base = OTHER; note = phosphorothioate linkage
ttagcctgtcagctgtgtggtcc

SEQ ID NO: 260 - RNA, 23 nt, synthetic construct
  source 1..23: mol_type = other RNA
  modified_base 1: mod_base = OTHER; note = 2'-O-methyl ribonucleotide
  modified_base 2: mod_base = OTHER; note = 2'-fluoro ribonucleotide
  modified_base 3..6: mod_base = OTHER; note = 2'-O-methyl ribonucleotide
  modified_base 7: mod_base = OTHER; note = 2'-fluoro ribonucleotide
  modified_base 8..11: mod_base = OTHER; note = 2'-O-methyl ribonucleotide
  modified_base 12: mod_base = OTHER; note = 2'-fluoro ribonucleotide
  modified_base 13: mod_base = OTHER; note = 2'-O-methyl ribonucleotide
  modified_base 14: mod_base = OTHER; note = 2'-fluoro ribonucleotide
  modified_base 15: mod_base = OTHER; note = 2'-O-methyl ribonucleotide
  modified_base 16: mod_base = OTHER; note = 2'-fluoro ribonucleotide
  modified_base 17..23: mod_base = OTHER; note = 2'-O-methyl ribonucleotide
  modified_base 1..3: mod_base = OTHER; note = phosphorothioate linkage
  modified_base 21..23: mod_base = OTHER; note = phosphorothioate linkage
tgtagcctgtcagctgtgtggtc

SEQ ID NO: 261 - RNA, 23 nt, synthetic construct
  source 1..23: mol_type = other RNA
  modified_base 1: mod_base = OTHER; note = 2'-O-methyl ribonucleotide
  modified_base 2: mod_base = OTHER; note = 2'-fluoro ribonucleotide
  modified_base 3..6: mod_base = OTHER; note = 2'-O-methyl ribonucleotide
  modified_base 7: mod_base = OTHER; note = 2'-fluoro ribonucleotide
  modified_base 8..11: mod_base = OTHER; note = 2'-O-methyl ribonucleotide
  modified_base 12: mod_base = OTHER; note = 2'-fluoro ribonucleotide
  modified_base 13: mod_base = OTHER; note = 2'-O-methyl ribonucleotide
  modified_base 14: mod_base = OTHER; note = 2'-fluoro ribonucleotide
  modified_base 15: mod_base = OTHER; note = 2'-O-methyl ribonucleotide
  modified_base 16: mod_base = OTHER; note = 2'-fluoro ribonucleotide
  modified_base 17..23: mod_base = OTHER; note = 2'-O-methyl ribonucleotide
  modified_base 1..3: mod_base = OTHER; note = phosphorothioate linkage
  modified_base 21..23: mod_base = OTHER; note = phosphorothioate linkage
ttgtagcctgtcagctgtgtggt

SEQ ID NO: 262 - RNA, 23 nt, synthetic construct
  source 1..23: mol_type = other RNA
  modified_base 1: mod_base = OTHER; note = 2'-O-methyl ribonucleotide
  modified_base 2: mod_base = OTHER; note = 2'-fluoro ribonucleotide
  modified_base 3..6: mod_base = OTHER; note = 2'-O-methyl ribonucleotide
  modified_base 7: mod_base = OTHER; note = 2'-fluoro ribonucleotide
  modified_base 8..11: mod_base = OTHER; note = 2'-O-methyl ribonucleotide
  modified_base 12: mod_base = OTHER; note = 2'-fluoro ribonucleotide
  modified_base 13: mod_base = OTHER; note = 2'-O-methyl ribonucleotide
  modified_base 14: mod_base = OTHER; note = 2'-fluoro ribonucleotide
  modified_base 15: mod_base = OTHER; note = 2'-O-methyl ribonucleotide
  modified_base 16: mod_base = OTHER; note = 2'-fluoro ribonucleotide
  modified_base 17..23: mod_base = OTHER; note = 2'-O-methyl ribonucleotide
  modified_base 1..3: mod_base = OTHER; note = phosphorothioate linkage
  modified_base 21..23: mod_base = OTHER; note = phosphorothioate linkage
tgattgcctgtagcctgtcagct

SEQ ID NO: 263 - RNA, 23 nt, synthetic construct
  source 1..23: mol_type = other RNA
  modified_base 1: mod_base = OTHER; note = 2'-O-methyl ribonucleotide
  modified_base 2: mod_base = OTHER; note = 2'-fluoro ribonucleotide
  modified_base 3..6: mod_base = OTHER; note = 2'-O-methyl ribonucleotide
  modified_base 7: mod_base = OTHER; note = 2'-fluoro ribonucleotide
  modified_base 8..11: mod_base = OTHER; note = 2'-O-methyl ribonucleotide
  modified_base 12: mod_base = OTHER; note = 2'-fluoro ribonucleotide
  modified_base 13: mod_base = OTHER; note = 2'-O-methyl ribonucleotide
  modified_base 14: mod_base = OTHER; note = 2'-fluoro ribonucleotide
  modified_base 15: mod_base = OTHER; note = 2'-O-methyl ribonucleotide
  modified_base 16: mod_base = OTHER; note = 2'-fluoro ribonucleotide
  modified_base 17..23: mod_base = OTHER; note = 2'-O-methyl ribonucleotide
  modified_base 1..3: mod_base = OTHER; note = phosphorothioate linkage
  modified_base 21..23: mod_base = OTHER; note = phosphorothioate linkage
tcgggaggtgcagttcttgtcct

SEQ ID NO: 264 - RNA, 23 nt, synthetic construct
  source 1..23: mol_type = other RNA
  modified_base 1: mod_base = OTHER; note = 2'-O-methyl ribonucleotide
  modified_base 2: mod_base = OTHER; note = 2'-fluoro ribonucleotide
  modified_base 3..6: mod_base = OTHER; note = 2'-O-methyl ribonucleotide
  modified_base 7: mod_base = OTHER; note = 2'-fluoro ribonucleotide
  modified_base 8..11: mod_base = OTHER; note = 2'-O-methyl ribonucleotide
  modified_base 12: mod_base = OTHER; note = 2'-fluoro ribonucleotide
  modified_base 13: mod_base = OTHER; note = 2'-O-methyl ribonucleotide
  modified_base 14: mod_base = OTHER; note = 2'-fluoro ribonucleotide
  modified_base 15: mod_base = OTHER; note = 2'-O-methyl ribonucleotide
  modified_base 16: mod_base = OTHER; note = 2'-fluoro ribonucleotide
  modified_base 17..23: mod_base = OTHER; note = 2'-O-methyl ribonucleotide
  modified_base 1..3: mod_base = OTHER; note = phosphorothioate linkage
  modified_base 21..23: mod_base = OTHER; note = phosphorothioate linkage
tgcgcatccagccgggaggtgca

SEQ ID NO: 265 - RNA, 23 nt, synthetic construct
  source 1..23: mol_type = other RNA
  modified_base 1: mod_base = OTHER; note = 2'-O-methyl ribonucleotide
  modified_base 2: mod_base = OTHER; note = 2'-fluoro ribonucleotide
  modified_base 3..6: mod_base = OTHER; note = 2'-O-methyl ribonucleotide
  modified_base 7: mod_base = OTHER; note = 2'-fluoro ribonucleotide
  modified_base 8..11: mod_base = OTHER; note = 2'-O-methyl ribonucleotide
  modified_base 12: mod_base = OTHER; note = 2'-fluoro ribonucleotide
  modified_base 13: mod_base = OTHER; note = 2'-O-methyl ribonucleotide
  modified_base 14: mod_base = OTHER; note = 2'-fluoro ribonucleotide
  modified_base 15: mod_base = OTHER; note = 2'-O-methyl ribonucleotide
  modified_base 16: mod_base = OTHER; note = 2'-fluoro ribonucleotide
  modified_base 17..23: mod_base = OTHER; note = 2'-O-methyl ribonucleotide
  modified_base 1..3: mod_base = OTHER; note = phosphorothioate linkage
  modified_base 21..23: mod_base = OTHER; note = phosphorothioate linkage
tttgtgcgcatccagccgggagg

SEQ ID NO: 266 - RNA, 23 nt, synthetic construct
  source 1..23: mol_type = other RNA
  modified_base 1: mod_base = OTHER; note = 2'-O-methyl ribonucleotide
  modified_base 2: mod_base = OTHER; note = 2'-fluoro ribonucleotide
  modified_base 3..6: mod_base = OTHER; note = 2'-O-methyl ribonucleotide
  modified_base 7: mod_base = OTHER; note = 2'-fluoro ribonucleotide
  modified_base 8..11: mod_base = OTHER; note = 2'-O-methyl ribonucleotide
  modified_base 12: mod_base = OTHER; note = 2'-fluoro ribonucleotide
  modified_base 13: mod_base = OTHER; note = 2'-O-methyl ribonucleotide
  modified_base 14: mod_base = OTHER; note = 2'-fluoro ribonucleotide
  modified_base 15: mod_base = OTHER; note = 2'-O-methyl ribonucleotide
  modified_base 16: mod_base = OTHER; note = 2'-fluoro ribonucleotide
  modified_base 17..23: mod_base = OTHER; note = 2'-O-methyl ribonucleotide
  modified_base 1..3: mod_base = OTHER; note = phosphorothioate linkage
  modified_base 21..23: mod_base = OTHER; note = phosphorothioate linkage
tcttgtgcgcatccagccgggag

SEQ ID NO: 267 - RNA, 23 nt, synthetic construct
  source 1..23: mol_type = other RNA
  modified_base 1: mod_base = OTHER; note = 2'-O-methyl ribonucleotide
  modified_base 2: mod_base = OTHER; note = 2'-fluoro ribonucleotide
  modified_base 3..6: mod_base = OTHER; note = 2'-O-methyl ribonucleotide
  modified_base 7: mod_base = OTHER; note = 2'-fluoro ribonucleotide
  modified_base 8..11: mod_base = OTHER; note = 2'-O-methyl ribonucleotide
  modified_base 12: mod_base = OTHER; note = 2'-fluoro ribonucleotide
  modified_base 13: mod_base = OTHER; note = 2'-O-methyl ribonucleotide
  modified_base 14: mod_base = OTHER; note = 2'-fluoro ribonucleotide
  modified_base 15: mod_base = OTHER; note = 2'-O-methyl ribonucleotide
  modified_base 16: mod_base = OTHER; note = 2'-fluoro ribonucleotide
  modified_base 17..23: mod_base = OTHER; note = 2'-O-methyl ribonucleotide
  modified_base 1..3: mod_base = OTHER; note = phosphorothioate linkage
  modified_base 21..23: mod_base = OTHER; note = phosphorothioate linkage
tggaccttgtgcgcatccagccg

SEQ ID NO: 268 - RNA, 23 nt, synthetic construct
  source 1..23: mol_type = other RNA
  modified_base 1: mod_base = OTHER; note = 2'-O-methyl ribonucleotide
  modified_base 2: mod_base = OTHER; note = 2'-fluoro ribonucleotide
  modified_base 3..6: mod_base = OTHER; note = 2'-O-methyl ribonucleotide
  modified_base 7: mod_base = OTHER; note = 2'-fluoro ribonucleotide
  modified_base 8..11: mod_base = OTHER; note = 2'-O-methyl ribonucleotide
  modified_base 12: mod_base = OTHER; note = 2'-fluoro ribonucleotide
  modified_base 13: mod_base = OTHER; note = 2'-O-methyl ribonucleotide
  modified_base 14: mod_base = OTHER; note = 2'-fluoro ribonucleotide
  modified_base 15: mod_base = OTHER; note = 2'-O-methyl ribonucleotide
  modified_base 16: mod_base = OTHER; note = 2'-fluoro ribonucleotide
  modified_base 17..23: mod_base = OTHER; note = 2'-O-methyl ribonucleotide
  modified_base 1..3: mod_base = OTHER; note = phosphorothioate linkage
  modified_base 21..23: mod_base = OTHER; note = phosphorothioate linkage
taggaccttgtgcgcatccagcc

SEQ ID NO: 269 - RNA, 23 nt, synthetic construct
  source 1..23: mol_type = other RNA
  modified_base 1: mod_base = OTHER; note = 2'-O-methyl ribonucleotide
  modified_base 2: mod_base = OTHER; note = 2'-fluoro ribonucleotide
  modified_base 3..6: mod_base = OTHER; note = 2'-O-methyl ribonucleotide
  modified_base 7: mod_base = OTHER; note = 2'-fluoro ribonucleotide
  modified_base 8..11: mod_base = OTHER; note = 2'-O-methyl ribonucleotide
  modified_base 12: mod_base = OTHER; note = 2'-fluoro ribonucleotide
  modified_base 13: mod_base = OTHER; note = 2'-O-methyl ribonucleotide
  modified_base 14: mod_base = OTHER; note = 2'-fluoro ribonucleotide
  modified_base 15: mod_base = OTHER; note = 2'-O-methyl ribonucleotide
  modified_base 16: mod_base = OTHER; note = 2'-fluoro ribonucleotide
  modified_base 17..23: mod_base = OTHER; note = 2'-O-methyl ribonucleotide
  modified_base 1..3: mod_base = OTHER; note = phosphorothioate linkage
  modified_base 21..23: mod_base = OTHER; note = phosphorothioate linkage
tgcagacaggaccttgtgcgcat

SEQ ID NO: 270 - RNA, 23 nt, synthetic construct
  source 1..23: mol_type = other RNA
  modified_base 1: mod_base = OTHER; note = 2'-O-methyl ribonucleotide
  modified_base 2: mod_base = OTHER; note = 2'-fluoro ribonucleotide
  modified_base 3..6: mod_base = OTHER; note = 2'-O-methyl ribonucleotide
  modified_base 7: mod_base = OTHER; note = 2'-fluoro ribonucleotide
  modified_base 8..11: mod_base = OTHER; note = 2'-O-methyl ribonucleotide
  modified_base 12: mod_base = OTHER; note = 2'-fluoro ribonucleotide
  modified_base 13: mod_base = OTHER; note = 2'-O-methyl ribonucleotide
  modified_base 14: mod_base = OTHER; note = 2'-fluoro ribonucleotide
  modified_base 15: mod_base = OTHER; note = 2'-O-methyl ribonucleotide
  modified_base 16: mod_base = OTHER; note = 2'-fluoro ribonucleotide
  modified_base 17..23: mod_base = OTHER; note = 2'-O-methyl ribonucleotide
  modified_base 1..3: mod_base = OTHER; note = phosphorothioate linkage
  modified_base 21..23: mod_base = OTHER; note = phosphorothioate linkage
taggccctgcacaaacggctgct

SEQ ID NO: 271 - RNA, 23 nt, synthetic construct
  source 1..23: mol_type = other RNA
  modified_base 1: mod_base = OTHER; note = 2'-O-methyl ribonucleotide
  modified_base 2: mod_base = OTHER; note = 2'-fluoro ribonucleotide
  modified_base 3..6: mod_base = OTHER; note = 2'-O-methyl ribonucleotide
  modified_base 7: mod_base = OTHER; note = 2'-fluoro ribonucleotide
  modified_base 8..11: mod_base = OTHER; note = 2'-O-methyl ribonucleotide
  modified_base 12: mod_base = OTHER; note = 2'-fluoro ribonucleotide
  modified_base 13: mod_base = OTHER; note = 2'-O-methyl ribonucleotide
  modified_base 14: mod_base = OTHER; note = 2'-fluoro ribonucleotide
  modified_base 15: mod_base = OTHER; note = 2'-O-methyl ribonucleotide
  modified_base 16: mod_base = OTHER; note = 2'-fluoro ribonucleotide
  modified_base 17..23: mod_base = OTHER; note = 2'-O-methyl ribonucleotide
  modified_base 1..3: mod_base = OTHER; note = phosphorothioate linkage
  modified_base 21..23: mod_base = OTHER; note = phosphorothioate linkage
ttatagagagccaggccctgcac

SEQ ID NO: 272 - RNA, 23 nt, synthetic construct
  source 1..23: mol_type = other RNA
  modified_base 1: mod_base = OTHER; note = 2'-O-methyl ribonucleotide
  modified_base 2: mod_base = OTHER; note = 2'-fluoro ribonucleotide
  modified_base 3..6: mod_base = OTHER; note = 2'-O-methyl ribonucleotide
  modified_base 7: mod_base = OTHER; note = 2'-fluoro ribonucleotide
  modified_base 8..11: mod_base = OTHER; note = 2'-O-methyl ribonucleotide
  modified_base 12: mod_base = OTHER; note = 2'-fluoro ribonucleotide
  modified_base 13: mod_base = OTHER; note = 2'-O-methyl ribonucleotide
  modified_base 14: mod_base = OTHER; note = 2'-fluoro ribonucleotide
  modified_base 15: mod_base = OTHER; note = 2'-O-methyl ribonucleotide
  modified_base 16: mod_base = OTHER; note = 2'-fluoro ribonucleotide
  modified_base 17..23: mod_base = OTHER; note = 2'-O-methyl ribonucleotide
  modified_base 1..3: mod_base = OTHER; note = phosphorothioate linkage
  modified_base 21..23: mod_base = OTHER; note = phosphorothioate linkage
tacaggggtatagagagccaggc

SEQ ID NO: 273 - RNA, 23 nt, synthetic construct
  source 1..23: mol_type = other RNA
  modified_base 1: mod_base = OTHER; note = 2'-O-methyl ribonucleotide
  modified_base 2: mod_base = OTHER; note = 2'-fluoro ribonucleotide
  modified_base 3..6: mod_base = OTHER; note = 2'-O-methyl ribonucleotide
  modified_base 7: mod_base = OTHER; note = 2'-fluoro ribonucleotide
  modified_base 8..11: mod_base = OTHER; note = 2'-O-methyl ribonucleotide
  modified_base 12: mod_base = OTHER; note = 2'-fluoro ribonucleotide
  modified_base 13: mod_base = OTHER; note = 2'-O-methyl ribonucleotide
  modified_base 14: mod_base = OTHER; note = 2'-fluoro ribonucleotide
  modified_base 15: mod_base = OTHER; note = 2'-O-methyl ribonucleotide
  modified_base 16: mod_base = OTHER; note = 2'-fluoro ribonucleotide
  modified_base 17..23: mod_base = OTHER; note = 2'-O-methyl ribonucleotide
  modified_base 1..3: mod_base = OTHER; note = phosphorothioate linkage
  modified_base 21..23: mod_base = OTHER; note = phosphorothioate linkage
tccacaggggtatagagagccag

SEQ ID NO: 274 - RNA, 23 nt, synthetic construct
  source 1..23: mol_type = other RNA
  modified_base 1: mod_base = OTHER; note = 2'-O-methyl ribonucleotide
  modified_base 2: mod_base = OTHER; note = 2'-fluoro ribonucleotide
  modified_base 3..6: mod_base = OTHER; note = 2'-O-methyl ribonucleotide
  modified_base 7: mod_base = OTHER; note = 2'-fluoro ribonucleotide
  modified_base 8..11: mod_base = OTHER; note = 2'-O-methyl ribonucleotide
  modified_base 12: mod_base = OTHER; note = 2'-fluoro ribonucleotide
  modified_base 13: mod_base = OTHER; note = 2'-O-methyl ribonucleotide
  modified_base 14: mod_base = OTHER; note = 2'-fluoro ribonucleotide
  modified_base 15: mod_base = OTHER; note = 2'-O-methyl ribonucleotide
  modified_base 16: mod_base = OTHER; note = 2'-fluoro ribonucleotide
  modified_base 17..23: mod_base = OTHER; note = 2'-O-methyl ribonucleotide
  modified_base 1..3: mod_base = OTHER; note = phosphorothioate linkage
  modified_base 21..23: mod_base = OTHER; note = phosphorothioate linkage
tgaccacaggggtatagagagcc

SEQ ID NO: 275 - RNA, 23 nt, synthetic construct
  source 1..23: mol_type = other RNA
  modified_base 1: mod_base = OTHER; note = 2'-O-methyl ribonucleotide
  modified_base 2: mod_base = OTHER; note = 2'-fluoro ribonucleotide
  modified_base 3..6: mod_base = OTHER; note = 2'-O-methyl ribonucleotide
  modified_base 7: mod_base = OTHER; note = 2'-fluoro ribonucleotide
  modified_base 8..11: mod_base = OTHER; note = 2'-O-methyl ribonucleotide
  modified_base 12: mod_base = OTHER; note = 2'-fluoro ribonucleotide
  modified_base 13: mod_base = OTHER; note = 2'-O-methyl ribonucleotide
  modified_base 14: mod_base = OTHER; note = 2'-fluoro ribonucleotide
  modified_base 15: mod_base = OTHER; note = 2'-O-methyl ribonucleotide
  modified_base 16: mod_base = OTHER; note = 2'-fluoro ribonucleotide
  modified_base 17..23: mod_base = OTHER; note = 2'-O-methyl ribonucleotide
  modified_base 1..3: mod_base = OTHER; note = phosphorothioate linkage
  modified_base 21..23: mod_base = OTHER; note = phosphorothioate linkage
tggaccacaggggtatagagagc

SEQ ID NO: 276 - RNA, 23 nt, synthetic construct
  source 1..23: mol_type = other RNA
  modified_base 1: mod_base = OTHER; note = 2'-O-methyl ribonucleotide
  modified_base 2: mod_base = OTHER; note = 2'-fluoro ribonucleotide
  modified_base 3..6: mod_base = OTHER; note = 2'-O-methyl ribonucleotide
  modified_base 7: mod_base = OTHER; note = 2'-fluoro ribonucleotide
  modified_base 8..11: mod_base = OTHER; note = 2'-O-methyl ribonucleotide
  modified_base 12: mod_base = OTHER; note = 2'-fluoro ribonucleotide
  modified_base 13: mod_base = OTHER; note = 2'-O-methyl ribonucleotide
  modified_base 14: mod_base = OTHER; note = 2'-fluoro ribonucleotide
  modified_base 15: mod_base = OTHER; note = 2'-O-methyl ribonucleotide
  modified_base 16: mod_base = OTHER; note = 2'-fluoro ribonucleotide
  modified_base 17..23: mod_base = OTHER; note = 2'-O-methyl ribonucleotide
  modified_base 1..3: mod_base = OTHER; note = phosphorothioate linkage
  modified_base 21..23: mod_base = OTHER; note = phosphorothioate linkage
tgaggaccacaggggtatagaga

SEQ ID NO: 277 - RNA, 23 nt, synthetic construct
  source 1..23: mol_type = other RNA
  modified_base 1: mod_base = OTHER; note = 2'-O-methyl ribonucleotide
  modified_base 2: mod_base = OTHER; note = 2'-fluoro ribonucleotide
  modified_base 3..6: mod_base = OTHER; note = 2'-O-methyl ribonucleotide
  modified_base 7: mod_base = OTHER; note = 2'-fluoro ribonucleotide
  modified_base 8..11: mod_base = OTHER; note = 2'-O-methyl ribonucleotide
  modified_base 12: mod_base = OTHER; note = 2'-fluoro ribonucleotide
  modified_base 13: mod_base = OTHER; note = 2'-O-methyl ribonucleotide
  modified_base 14: mod_base = OTHER; note = 2'-fluoro ribonucleotide
  modified_base 15: mod_base = OTHER; note = 2'-O-methyl ribonucleotide
  modified_base 16: mod_base = OTHER; note = 2'-fluoro ribonucleotide
  modified_base 17..23: mod_base = OTHER; note = 2'-O-methyl ribonucleotide
  modified_base 1..3: mod_base = OTHER; note = phosphorothioate linkage
  modified_base 21..23: mod_base = OTHER; note = phosphorothioate linkage
tagagcgtgggaggaccacaggg

SEQ ID NO: 278 - RNA, 23 nt, synthetic construct
  source 1..23: mol_type = other RNA
  modified_base 1: mod_base = OTHER; note = 2'-O-methyl ribonucleotide
  modified_base 2: mod_base = OTHER; note = 2'-fluoro ribonucleotide
  modified_base 3..6: mod_base = OTHER; note = 2'-O-methyl ribonucleotide
  modified_base 7: mod_base = OTHER; note = 2'-fluoro ribonucleotide
  modified_base 8..11: mod_base = OTHER; note = 2'-O-methyl ribonucleotide
  modified_base 12: mod_base = OTHER; note = 2'-fluoro ribonucleotide
  modified_base 13: mod_base = OTHER; note = 2'-O-methyl ribonucleotide
  modified_base 14: mod_base = OTHER; note = 2'-fluoro ribonucleotide
  modified_base 15: mod_base = OTHER; note = 2'-O-methyl ribonucleotide
  modified_base 16: mod_base = OTHER; note = 2'-fluoro ribonucleotide
  modified_base 17..23: mod_base = OTHER; note = 2'-O-methyl ribonucleotide
  modified_base 1..3: mod_base = OTHER; note = phosphorothioate linkage
  modified_base 21..23: mod_base = OTHER; note = phosphorothioate linkage
tgtgaagtccagagagcgtggga

SEQ ID NO: 279 - RNA, 23 nt, synthetic construct
  source 1..23: mol_type = other RNA
  modified_base 1: mod_base = OTHER; note = 2'-O-methyl ribonucleotide
  modified_base 2: mod_base = OTHER; note = 2'-fluoro ribonucleotide
  modified_base 3..6: mod_base = OTHER; note = 2'-O-methyl ribonucleotide
  modified_base 7: mod_base = OTHER; note = 2'-fluoro ribonucleotide
  modified_base 8..11: mod_base = OTHER; note = 2'-O-methyl ribonucleotide
  modified_base 12: mod_base = OTHER; note = 2'-fluoro ribonucleotide
  modified_base 13: mod_base = OTHER; note = 2'-O-methyl ribonucleotide
  modified_base 14: mod_base = OTHER; note = 2'-fluoro ribonucleotide
  modified_base 15: mod_base = OTHER; note = 2'-O-methyl ribonucleotide
  modified_base 16: mod_base = OTHER; note = 2'-fluoro ribonucleotide
  modified_base 17..23: mod_base = OTHER; note = 2'-O-methyl ribonucleotide
  modified_base 1..3: mod_base = OTHER; note = phosphorothioate linkage
  modified_base 21..23: mod_base = OTHER; note = phosphorothioate linkage
tgttctgtgaagtccagagagcg

SEQ ID NO: 280 - RNA, 23 nt, synthetic construct
  source 1..23: mol_type = other RNA
  modified_base 1: mod_base = OTHER; note = 2'-O-methyl ribonucleotide
  modified_base 2: mod_base = OTHER; note = 2'-fluoro ribonucleotide
  modified_base 3..6: mod_base = OTHER; note = 2'-O-methyl ribonucleotide
  modified_base 7: mod_base = OTHER; note = 2'-fluoro ribonucleotide
  modified_base 8..11: mod_base = OTHER; note = 2'-O-methyl ribonucleotide
  modified_base 12: mod_base = OTHER; note = 2'-fluoro ribonucleotide
  modified_base 13: mod_base = OTHER; note = 2'-O-methyl ribonucleotide
  modified_base 14: mod_base = OTHER; note = 2'-fluoro ribonucleotide
  modified_base 15: mod_base = OTHER; note = 2'-O-methyl ribonucleotide
  modified_base 16: mod_base = OTHER; note = 2'-fluoro ribonucleotide
  modified_base 17..23: mod_base = OTHER; note = 2'-O-methyl ribonucleotide
  modified_base 1..3: mod_base = OTHER; note = phosphorothioate linkage
  modified_base 21..23: mod_base = OTHER; note = phosphorothioate linkage
ttgaacctgtcaatcttctcagc

SEQ ID NO: 281 - RNA, 23 nt, synthetic construct
  source 1..23: mol_type = other RNA
  modified_base 1: mod_base = OTHER; note = 2'-O-methyl ribonucleotide
  modified_base 2: mod_base = OTHER; note = 2'-fluoro ribonucleotide
  modified_base 3..6: mod_base = OTHER; note = 2'-O-methyl ribonucleotide
  modified_base 7: mod_base = OTHER; note = 2'-fluoro ribonucleotide
  modified_base 8..11: mod_base = OTHER; note = 2'-O-methyl ribonucleotide
  modified_base 12: mod_base = OTHER; note = 2'-fluoro ribonucleotide
  modified_base 13: mod_base = OTHER; note = 2'-O-methyl ribonucleotide
  modified_base 14: mod_base = OTHER; note = 2'-fluoro ribonucleotide
  modified_base 15: mod_base = OTHER; note = 2'-O-methyl ribonucleotide
  modified_base 16: mod_base = OTHER; note = 2'-fluoro ribonucleotide
  modified_base 17..23: mod_base = OTHER; note = 2'-O-methyl ribonucleotide
  modified_base 1..3: mod_base = OTHER; note = phosphorothioate linkage
  modified_base 21..23: mod_base = OTHER; note = phosphorothioate linkage
tacagcctgcatgaacctgtcaa

SEQ ID NO: 282 - RNA, 23 nt, synthetic construct
  source 1..23: mol_type = other RNA
  modified_base 1: mod_base = OTHER; note = 2'-O-methyl ribonucleotide
  modified_base 2: mod_base = OTHER; note = 2'-fluoro ribonucleotide
  modified_base 3..6: mod_base = OTHER; note = 2'-O-methyl ribonucleotide
  modified_base 7: mod_base = OTHER; note = 2'-fluoro ribonucleotide
  modified_base 8..11: mod_base = OTHER; note = 2'-O-methyl ribonucleotide
  modified_base 12: mod_base = OTHER; note = 2'-fluoro ribonucleotide
  modified_base 13: mod_base = OTHER; note = 2'-O-methyl ribonucleotide
  modified_base 14: mod_base = OTHER; note = 2'-fluoro ribonucleotide
  modified_base 15: mod_base = OTHER; note = 2'-O-methyl ribonucleotide
  modified_base 16: mod_base = OTHER; note = 2'-fluoro ribonucleotide
  modified_base 17..23: mod_base = OTHER; note = 2'-O-methyl ribonucleotide
  modified_base 1..3: mod_base = OTHER; note = phosphorothioate linkage
  modified_base 21..23: mod_base = OTHER; note = phosphorothioate linkage
tttgaaagccagggtgctgtcca

SEQ ID NO: 283 - RNA, 23 nt, synthetic construct
  source 1..23: mol_type = other RNA
  modified_base 1: mod_base = OTHER; note = 2'-O-methyl ribonucleotide
  modified_base 2: mod_base = OTHER; note = 2'-fluoro ribonucleotide
  modified_base 3..6: mod_base = OTHER; note = 2'-O-methyl ribonucleotide
  modified_base 7: mod_base = OTHER; note = 2'-fluoro ribonucleotide
  modified_base 8..11: mod_base = OTHER; note = 2'-O-methyl ribonucleotide
  modified_base 12: mod_base = OTHER; note = 2'-fluoro ribonucleotide
  modified_base 13: mod_base = OTHER; note = 2'-O-methyl ribonucleotide
  modified_base 14: mod_base = OTHER; note = 2'-fluoro ribonucleotide
  modified_base 15: mod_base = OTHER; note = 2'-O-methyl ribonucleotide
  modified_base 16: mod_base = OTHER; note = 2'-fluoro ribonucleotide
  modified_base 17..23: mod_base = OTHER; note = 2'-O-methyl ribonucleotide
  modified_base 1..3: mod_base = OTHER; note = phosphorothioate linkage
  modified_base 21..23: mod_base = OTHER; note = phosphorothioate linkage
ttaggtgttgaaagccagggtgc

SEQ ID NO: 284 - RNA, 23 nt, synthetic construct
  source 1..23: mol_type = other RNA
  modified_base 1: mod_base = OTHER; note = 2'-O-methyl ribonucleotide
  modified_base 2: mod_base = OTHER; note = 2'-fluoro ribonucleotide
  modified_base 3..6: mod_base = OTHER; note = 2'-O-methyl ribonucleotide
  modified_base 7: mod_base = OTHER; note = 2'-fluoro ribonucleotide
  modified_base 8..11: mod_base = OTHER; note = 2'-O-methyl ribonucleotide
  modified_base 12: mod_base = OTHER; note = 2'-fluoro ribonucleotide
  modified_base 13: mod_base = OTHER; note = 2'-O-methyl ribonucleotide
  modified_base 14: mod_base = OTHER; note = 2'-fluoro ribonucleotide
  modified_base 15: mod_base = OTHER; note = 2'-O-methyl ribonucleotide
  modified_base 16: mod_base = OTHER; note = 2'-fluoro ribonucleotide
  modified_base 17..23: mod_base = OTHER; note = 2'-O-methyl ribonucleotide
  modified_base 1..3: mod_base = OTHER; note = phosphorothioate linkage
  modified_base 21..23: mod_base = OTHER; note = phosphorothioate linkage
tgacgtaggtgttgaaagccagg

SEQ ID NO: 285 - RNA, 23 nt, synthetic construct
  source 1..23: mol_type = other RNA
  modified_base 1: mod_base = OTHER; note = 2'-O-methyl ribonucleotide
  modified_base 2: mod_base = OTHER; note = 2'-fluoro ribonucleotide
  modified_base 3..6: mod_base = OTHER; note = 2'-O-methyl ribonucleotide
  modified_base 7: mod_base = OTHER; note = 2'-fluoro ribonucleotide
  modified_base 8..11: mod_base = OTHER; note = 2'-O-methyl ribonucleotide
  modified_base 12: mod_base = OTHER; note = 2'-fluoro ribonucleotide
  modified_base 13: mod_base = OTHER; note = 2'-O-methyl ribonucleotide
  modified_base 14: mod_base = OTHER; note = 2'-fluoro ribonucleotide
  modified_base 15: mod_base = OTHER; note = 2'-O-methyl ribonucleotide
  modified_base 16: mod_base = OTHER; note = 2'-fluoro ribonucleotide
  modified_base 17..23: mod_base = OTHER; note = 2'-O-methyl ribonucleotide
  modified_base 1..3: mod_base = OTHER; note = phosphorothioate linkage
  modified_base 21..23: mod_base = OTHER; note = phosphorothioate linkage
tggacgtaggtgttgaaagccag

SEQ ID NO: 286 - RNA, 23 nt, synthetic construct
  source 1..23: mol_type = other RNA
  modified_base 1: mod_base = OTHER; note = 2'-O-methyl ribonucleotide
  modified_base 2: mod_base = OTHER; note = 2'-fluoro ribonucleotide
  modified_base 3..6: mod_base = OTHER; note = 2'-O-methyl ribonucleotide
  modified_base 7: mod_base = OTHER; note = 2'-fluoro ribonucleotide
  modified_base 8..11: mod_base = OTHER; note = 2'-O-methyl ribonucleotide
  modified_base 12: mod_base = OTHER; note = 2'-fluoro ribonucleotide
  modified_base 13: mod_base = OTHER; note = 2'-O-methyl ribonucleotide
  modified_base 14: mod_base = OTHER; note = 2'-fluoro ribonucleotide
  modified_base 15: mod_base = OTHER; note = 2'-O-methyl ribonucleotide
  modified_base 16: mod_base = OTHER; note = 2'-fluoro ribonucleotide
  modified_base 17..23: mod_base = OTHER; note = 2'-O-methyl ribonucleotide
  modified_base 1..3: mod_base = OTHER; note = phosphorothioate linkage
  modified_base 21..23: mod_base = OTHER; note = phosphorothioate linkage
ttggacgtaggtgttgaaagcca

SEQ ID NO: 287 - RNA, 23 nt, synthetic construct
  source 1..23: mol_type = other RNA
  modified_base 1: mod_base = OTHER; note = 2'-O-methyl ribonucleotide
  modified_base 2: mod_base = OTHER; note = 2'-fluoro ribonucleotide
  modified_base 3..6: mod_base = OTHER; note = 2'-O-methyl ribonucleotide
  modified_base 7: mod_base = OTHER; note = 2'-fluoro ribonucleotide
  modified_base 8..11: mod_base = OTHER; note = 2'-O-methyl ribonucleotide
  modified_base 12: mod_base = OTHER; note = 2'-fluoro ribonucleotide
  modified_base 13: mod_base = OTHER; note = 2'-O-methyl ribonucleotide
  modified_base 14: mod_base = OTHER; note = 2'-fluoro ribonucleotide
  modified_base 15: mod_base = OTHER; note = 2'-O-methyl ribonucleotide
  modified_base 16: mod_base = OTHER; note = 2'-fluoro ribonucleotide
  modified_base 17..23: mod_base = OTHER; note = 2'-O-methyl ribonucleotide
  modified_base 1..3: mod_base = OTHER; note = phosphorothioate linkage
  modified_base 21..23: mod_base = OTHER; note = phosphorothioate linkage
tagtggacgtaggtgttgaaagc

SEQ ID NO: 288 - RNA, 23 nt, synthetic construct
  source 1..23: mol_type = other RNA
  modified_base 1: mod_base = OTHER; note = 2'-O-methyl ribonucleotide
  modified_base 2: mod_base = OTHER; note = 2'-fluoro ribonucleotide
  modified_base 3..6: mod_base = OTHER; note = 2'-O-methyl ribonucleotide
  modified_base 7: mod_base = OTHER; note = 2'-fluoro ribonucleotide
  modified_base 8..11: mod_base = OTHER; note = 2'-O-methyl ribonucleotide
  modified_base 12: mod_base = OTHER; note = 2'-fluoro ribonucleotide
  modified_base 13: mod_base = OTHER; note = 2'-O-methyl ribonucleotide
  modified_base 14: mod_base = OTHER; note = 2'-fluoro ribonucleotide
  modified_base 15: mod_base = OTHER; note = 2'-O-methyl ribonucleotide
  modified_base 16: mod_base = OTHER; note = 2'-fluoro ribonucleotide
  modified_base 17..23: mod_base = OTHER; note = 2'-O-methyl ribonucleotide
  modified_base 1..3: mod_base = OTHER; note = phosphorothioate linkage
  modified_base 21..23: mod_base = OTHER; note = phosphorothioate linkage
tgaagtggacgtaggtgttgaaa

SEQ ID NO: 289 - RNA, 23 nt, synthetic construct
  source 1..23: mol_type = other RNA
  modified_base 1: mod_base = OTHER; note = 2'-O-methyl ribonucleotide
  modified_base 2: mod_base = OTHER; note = 2'-fluoro ribonucleotide
  modified_base 3..6: mod_base = OTHER; note = 2'-O-methyl ribonucleotide
  modified_base 7: mod_base = OTHER; note = 2'-fluoro ribonucleotide
  modified_base 8..11: mod_base = OTHER; note = 2'-O-methyl ribonucleotide
  modified_base 12: mod_base = OTHER; note = 2'-fluoro ribonucleotide
  modified_base 13: mod_base = OTHER; note = 2'-O-methyl ribonucleotide
  modified_base 14: mod_base = OTHER; note = 2'-fluoro ribonucleotide
  modified_base 15: mod_base = OTHER; note = 2'-O-methyl ribonucleotide
  modified_base 16: mod_base = OTHER; note = 2'-fluoro ribonucleotide
  modified_base 17..23: mod_base = OTHER; note = 2'-O-methyl ribonucleotide
  modified_base 1..3: mod_base = OTHER; note = phosphorothioate linkage
  modified_base 21..23: mod_base = OTHER; note = phosphorothioate linkage
tggaagtggacgtaggtgttgaa

SEQ ID NO: 290 - RNA, 23 nt, synthetic construct
  source 1..23: mol_type = other RNA
  modified_base 1: mod_base = OTHER; note = 2'-O-methyl ribonucleotide
  modified_base 2: mod_base = OTHER; note = 2'-fluoro ribonucleotide
  modified_base 3..6: mod_base = OTHER; note = 2'-O-methyl ribonucleotide
  modified_base 7: mod_base = OTHER; note = 2'-fluoro ribonucleotide
  modified_base 8..11: mod_base = OTHER; note = 2'-O-methyl ribonucleotide
  modified_base 12: mod_base = OTHER; note = 2'-fluoro ribonucleotide
  modified_base 13: mod_base = OTHER; note = 2'-O-methyl ribonucleotide
  modified_base 14: mod_base = OTHER; note = 2'-fluoro ribonucleotide
  modified_base 15: mod_base = OTHER; note = 2'-O-methyl ribonucleotide
  modified_base 16: mod_base = OTHER; note = 2'-fluoro ribonucleotide
  modified_base 17..23: mod_base = OTHER; note = 2'-O-methyl ribonucleotide
  modified_base 1..3: mod_base = OTHER; note = phosphorothioate linkage
  modified_base 21..23: mod_base = OTHER; note = phosphorothioate linkage
ttggaagtggacgtaggtgttga

SEQ ID NO: 291 - RNA, 23 nt, synthetic construct
  source 1..23: mol_type = other RNA
  modified_base 1: mod_base = OTHER; note = 2'-O-methyl ribonucleotide
  modified_base 2: mod_base = OTHER; note = 2'-fluoro ribonucleotide
  modified_base 3..6: mod_base = OTHER; note = 2'-O-methyl ribonucleotide
  modified_base 7: mod_base = OTHER; note = 2'-fluoro ribonucleotide
  modified_base 8..11: mod_base = OTHER; note = 2'-O-methyl ribonucleotide
  modified_base 12: mod_base = OTHER; note = 2'-fluoro ribonucleotide
  modified_base 13: mod_base = OTHER; note = 2'-O-methyl ribonucleotide
  modified_base 14: mod_base = OTHER; note = 2'-fluoro ribonucleotide
  modified_base 15: mod_base = OTHER; note = 2'-O-methyl ribonucleotide
  modified_base 16: mod_base = OTHER; note = 2'-fluoro ribonucleotide
  modified_base 17..23: mod_base = OTHER; note = 2'-O-methyl ribonucleotide
  modified_base 1..3: mod_base = OTHER; note = phosphorothioate linkage
  modified_base 21..23: mod_base = OTHER; note = phosphorothioate linkage
tttcccttggaagtggacgtagg

SEQ ID NO: 292 - RNA, 23 nt, synthetic construct
  source 1..23: mol_type = other RNA
  modified_base 1: mod_base = OTHER; note = 2'-O-methyl ribonucleotide
  modified_base 2: mod_base = OTHER; note = 2'-fluoro ribonucleotide
  modified_base 3..6: mod_base = OTHER; note = 2'-O-methyl ribonucleotide
  modified_base 7: mod_base = OTHER; note = 2'-fluoro ribonucleotide
  modified_base 8..11: mod_base = OTHER; note = 2'-O-methyl ribonucleotide
  modified_base 12: mod_base = OTHER; note = 2'-fluoro ribonucleotide
  modified_base 13: mod_base = OTHER; note = 2'-O-methyl ribonucleotide
  modified_base 14: mod_base = OTHER; note = 2'-fluoro ribonucleotide
  modified_base 15: mod_base = OTHER; note = 2'-O-methyl ribonucleotide
  modified_base 16: mod_base = OTHER; note = 2'-fluoro ribonucleotide
  modified_base 17..23: mod_base = OTHER; note = 2'-O-methyl ribonucleotide
  modified_base 1..3: mod_base = OTHER; note = phosphorothioate linkage
  modified_base 21..23: mod_base = OTHER; note = phosphorothioate linkage
tgtgctgttgtccacccagaact

SEQ ID NO: 293 - RNA, 23 nt, synthetic construct
  source 1..23: mol_type = other RNA
  modified_base 1: mod_base = OTHER; note = 2'-O-methyl ribonucleotide
  modified_base 2: mod_base = OTHER; note = 2'-fluoro ribonucleotide
  modified_base 3..6: mod_base = OTHER; note = 2'-O-methyl ribonucleotide
  modified_base 7: mod_base = OTHER; note = 2'-fluoro ribonucleotide
  modified_base 8..11: mod_base = OTHER; note = 2'-O-methyl ribonucleotide
  modified_base 12: mod_base = OTHER; note = 2'-fluoro ribonucleotide
  modified_base 13: mod_base = OTHER; note = 2'-O-methyl ribonucleotide
  modified_base 14: mod_base = OTHER; note = 2'-fluoro ribonucleotide
  modified_base 15: mod_base = OTHER; note = 2'-O-methyl ribonucleotide
  modified_base 16: mod_base = OTHER; note = 2'-fluoro ribonucleotide
  modified_base 17..23: mod_base = OTHER; note = 2'-O-methyl ribonucleotide
  modified_base 1..3: mod_base = OTHER; note = phosphorothioate linkage
  modified_base 21..23: mod_base = OTHER; note = phosphorothioate linkage
tttgagtcaccgagaagttgtcc

SEQ ID NO: 294 - RNA, 23 nt, synthetic construct
  source 1..23: mol_type = other RNA
  modified_base 1: mod_base = OTHER; note = 2'-O-methyl ribonucleotide
  modified_base 2: mod_base = OTHER; note = 2'-fluoro ribonucleotide
  modified_base 3..6: mod_base = OTHER; note = 2'-O-methyl ribonucleotide
  modified_base 7: mod_base = OTHER; note = 2'-fluoro ribonucleotide
  modified_base 8..11: mod_base = OTHER; note = 2'-O-methyl ribonucleotide
  modified_base 12: mod_base = OTHER; note = 2'-fluoro ribonucleotide
  modified_base 13: mod_base = OTHER; note = 2'-O-methyl ribonucleotide
  modified_base 14: mod_base = OTHER; note = 2'-fluoro ribonucleotide
  modified_base 15: mod_base = OTHER; note = 2'-O-methyl ribonucleotide
  modified_base 16: mod_base = OTHER; note = 2'-fluoro ribonucleotide
  modified_base 17..23: mod_base = OTHER; note = 2'-O-methyl ribonucleotide
  modified_base 1..3: mod_base = OTHER; note = phosphorothioate linkage
  modified_base 21..23: mod_base = OTHER; note = phosphorothioate linkage
tcttgagtcaccgagaagttgtc

SEQ ID NO: 295 - RNA, 23 nt, synthetic construct
  source 1..23: mol_type = other RNA
  modified_base 1: mod_base = OTHER; note = 2'-O-methyl ribonucleotide
  modified_base 2: mod_base = OTHER; note = 2'-fluoro ribonucleotide
  modified_base 3..6: mod_base = OTHER; note = 2'-O-methyl ribonucleotide
  modified_base 7: mod_base = OTHER; note = 2'-fluoro ribonucleotide
  modified_base 8..11: mod_base = OTHER; note = 2'-O-methyl ribonucleotide
  modified_base 12: mod_base = OTHER; note = 2'-fluoro ribonucleotide
  modified_base 13: mod_base = OTHER; note = 2'-O-methyl ribonucleotide
  modified_base 14: mod_base = OTHER; note = 2'-fluoro ribonucleotide
  modified_base 15: mod_base = OTHER; note = 2'-O-methyl ribonucleotide
  modified_base 16: mod_base = OTHER; note = 2'-fluoro ribonucleotide
  modified_base 17..23: mod_base = OTHER; note = 2'-O-methyl ribonucleotide
  modified_base 1..3: mod_base = OTHER; note = phosphorothioate linkage
  modified_base 21..23: mod_base = OTHER; note = phosphorothioate linkage
tacttgagtcaccgagaagttgt

SEQ ID NO: 296 - RNA, 23 nt, synthetic construct
  source 1..23: mol_type = other RNA
  modified_base 1: mod_base = OTHER; note = 2'-O-methyl ribonucleotide
  modified_base 2: mod_base = OTHER; note = 2'-fluoro ribonucleotide
  modified_base 3..6: mod_base = OTHER; note = 2'-O-methyl ribonucleotide
  modified_base 7: mod_base = OTHER; note = 2'-fluoro ribonucleotide
  modified_base 8..11: mod_base = OTHER; note = 2'-O-methyl ribonucleotide
  modified_base 12: mod_base = OTHER; note = 2'-fluoro ribonucleotide
  modified_base 13: mod_base = OTHER; note = 2'-O-methyl ribonucleotide
  modified_base 14: mod_base = OTHER; note = 2'-fluoro ribonucleotide
  modified_base 15: mod_base = OTHER; note = 2'-O-methyl ribonucleotide
  modified_base 16: mod_base = OTHER; note = 2'-fluoro ribonucleotide
  modified_base 17..23: mod_base = OTHER; note = 2'-O-methyl ribonucleotide
  modified_base 1..3: mod_base = OTHER; note = phosphorothioate linkage
  modified_base 21..23: mod_base = OTHER; note = phosphorothioate linkage
tcacttgagtcaccgagaagttg

SEQ ID NO: 297 - RNA, 23 nt, synthetic construct
  source 1..23: mol_type = other RNA
  modified_base 1: mod_base = OTHER; note = 2'-O-methyl ribonucleotide
  modified_base 2: mod_base = OTHER; note = 2'-fluoro ribonucleotide
  modified_base 3..6: mod_base = OTHER; note = 2'-O-methyl ribonucleotide
  modified_base 7: mod_base = OTHER; note = 2'-fluoro ribonucleotide
  modified_base 8..11: mod_base = OTHER; note = 2'-O-methyl ribonucleotide
  modified_base 12: mod_base = OTHER; note = 2'-fluoro ribonucleotide
  modified_base 13: mod_base = OTHER; note = 2'-O-methyl ribonucleotide
  modified_base 14: mod_base = OTHER; note = 2'-fluoro ribonucleotide
  modified_base 15: mod_base = OTHER; note = 2'-O-methyl ribonucleotide
  modified_base 16: mod_base = OTHER; note = 2'-fluoro ribonucleotide
  modified_base 17..23: mod_base = OTHER; note = 2'-O-methyl ribonucleotide
  modified_base 1..3: mod_base = OTHER; note = phosphorothioate linkage
  modified_base 21..23: mod_base = OTHER; note = phosphorothioate linkage
tgcacttgagtcaccgagaagtt

SEQ ID NO: 298 - RNA, 23 nt, synthetic construct
  source 1..23: mol_type = other RNA
  modified_base 1: mod_base = OTHER; note = 2'-O-methyl ribonucleotide
  modified_base 2: mod_base = OTHER; note = 2'-fluoro ribonucleotide
  modified_base 3..6: mod_base = OTHER; note = 2'-O-methyl ribonucleotide
  modified_base 7: mod_base = OTHER; note = 2'-fluoro ribonucleotide
  modified_base 8..11: mod_base = OTHER; note = 2'-O-methyl ribonucleotide
  modified_base 12: mod_base = OTHER; note = 2'-fluoro ribonucleotide
  modified_base 13: mod_base = OTHER; note = 2'-O-methyl ribonucleotide
  modified_base 14: mod_base = OTHER; note = 2'-fluoro ribonucleotide
  modified_base 15: mod_base = OTHER; note = 2'-O-methyl ribonucleotide
  modified_base 16: mod_base = OTHER; note = 2'-fluoro ribonucleotide
  modified_base 17..23: mod_base = OTHER; note = 2'-O-methyl ribonucleotide
  modified_base 1..3: mod_base = OTHER; note = phosphorothioate linkage
  modified_base 21..23: mod_base = OTHER; note = phosphorothioate linkage
tgggcacttgagtcaccgagaag

SEQ ID NO: 299 - RNA, 23 nt, synthetic construct
  source 1..23: mol_type = other RNA
  modified_base 1: mod_base = OTHER; note = 2'-O-methyl ribonucleotide
  modified_base 2: mod_base = OTHER; note = 2'-fluoro ribonucleotide
  modified_base 3..6: mod_base = OTHER; note = 2'-O-methyl ribonucleotide
  modified_base 7: mod_base = OTHER; note = 2'-fluoro ribonucleotide
  modified_base 8..11: mod_base = OTHER; note = 2'-O-methyl ribonucleotide
  modified_base 12: mod_base = OTHER; note = 2'-fluoro ribonucleotide
  modified_base 13: mod_base = OTHER; note = 2'-O-methyl ribonucleotide
  modified_base 14: mod_base = OTHER; note = 2'-fluoro ribonucleotide
  modified_base 15: mod_base = OTHER; note = 2'-O-methyl ribonucleotide
  modified_base 16: mod_base = OTHER; note = 2'-fluoro ribonucleotide
  modified_base 17..23: mod_base = OTHER; note = 2'-O-methyl ribonucleotide
  modified_base 1..3: mod_base = OTHER; note = phosphorothioate linkage
  modified_base 21..23: mod_base = OTHER; note = phosphorothioate linkage
tagggcacttgagtcaccgagaa

SEQ ID NO: 300 - RNA, 23 nt, synthetic construct
  source 1..23: mol_type = other RNA
  modified_base 1: mod_base = OTHER; note = 2'-O-methyl ribonucleotide
  modified_base 2: mod_base = OTHER; note = 2'-fluoro ribonucleotide
  modified_base 3..6: mod_base = OTHER; note = 2'-O-methyl ribonucleotide
  modified_base 7: mod_base = OTHER; note = 2'-fluoro ribonucleotide
  modified_base 8..11: mod_base = OTHER; note = 2'-O-methyl ribonucleotide
  modified_base 12: mod_base = OTHER; note = 2'-fluoro ribonucleotide
  modified_base 13: mod_base = OTHER; note = 2'-O-methyl ribonucleotide
  modified_base 14: mod_base = OTHER; note = 2'-fluoro ribonucleotide
  modified_base 15: mod_base = OTHER; note = 2'-O-methyl ribonucleotide
  modified_base 16: mod_base = OTHER; note = 2'-fluoro ribonucleotide
  modified_base 17..23: mod_base = OTHER; note = 2'-O-methyl ribonucleotide
  modified_base 1..3: mod_base = OTHER; note = phosphorothioate linkage
  modified_base 21..23: mod_base = OTHER; note = phosphorothioate linkage
tgaagggcacttgagtcaccgag

SEQ ID NO: 301 - RNA, 23 nt, synthetic construct
  source 1..23: mol_type = other RNA
  modified_base 1: mod_base = OTHER; note = 2'-O-methyl ribonucleotide
  modified_base 2: mod_base = OTHER; note = 2'-fluoro ribonucleotide
  modified_base 3..6: mod_base = OTHER; note = 2'-O-methyl ribonucleotide
  modified_base 7: mod_base = OTHER; note = 2'-fluoro ribonucleotide
  modified_base 8..11: mod_base = OTHER; note = 2'-O-methyl ribonucleotide
  modified_base 12: mod_base = OTHER; note = 2'-fluoro ribonucleotide
  modified_base 13: mod_base = OTHER; note = 2'-O-methyl ribonucleotide
  modified_base 14: mod_base = OTHER; note = 2'-fluoro ribonucleotide
  modified_base 15: mod_base = OTHER; note = 2'-O-methyl ribonucleotide
  modified_base 16: mod_base = OTHER; note = 2'-fluoro ribonucleotide
  modified_base 17..23: mod_base = OTHER; note = 2'-O-methyl ribonucleotide
  modified_base 1..3: mod_base = OTHER; note = phosphorothioate linkage
  modified_base 21..23: mod_base = OTHER; note = phosphorothioate linkage
tgcaggcgctctcagtgaagggc

SEQ ID NO: 302 - RNA, 23 nt, synthetic construct
  source 1..23: mol_type = other RNA
  modified_base 1: mod_base = OTHER; note = 2'-O-methyl ribonucleotide
  modified_base 2: mod_base = OTHER; note = 2'-fluoro ribonucleotide
  modified_base 3..6: mod_base = OTHER; note = 2'-O-methyl ribonucleotide
  modified_base 7: mod_base = OTHER; note = 2'-fluoro ribonucleotide
  modified_base 8..11: mod_base = OTHER; note = 2'-O-methyl ribonucleotide
  modified_base 12: mod_base = OTHER; note = 2'-fluoro ribonucleotide
  modified_base 13: mod_base = OTHER; note = 2'-O-methyl ribonucleotide
  modified_base 14: mod_base = OTHER; note = 2'-fluoro ribonucleotide
  modified_base 15: mod_base = OTHER; note = 2'-O-methyl ribonucleotide
  modified_base 16: mod_base = OTHER; note = 2'-fluoro ribonucleotide
  modified_base 17..23: mod_base = OTHER; note = 2'-O-methyl ribonucleotide
  modified_base 1..3: mod_base = OTHER; note = phosphorothioate linkage
  modified_base 21..23: mod_base = OTHER; note = phosphorothioate linkage
tgtgaggctggatcagcagcagg

SEQ ID NO: 303 - RNA, 23 nt, synthetic construct
  source 1..23: mol_type = other RNA
  modified_base 1: mod_base = OTHER; note = 2'-O-methyl ribonucleotide
  modified_base 2: mod_base = OTHER; note = 2'-fluoro ribonucleotide
  modified_base 3..6: mod_base = OTHER; note = 2'-O-methyl ribonucleotide
  modified_base 7: mod_base = OTHER; note = 2'-fluoro ribonucleotide
  modified_base 8..11: mod_base = OTHER; note = 2'-O-methyl ribonucleotide
  modified_base 12: mod_base = OTHER; note = 2'-fluoro ribonucleotide
  modified_base 13: mod_base = OTHER; note = 2'-O-methyl ribonucleotide
  modified_base 14: mod_base = OTHER; note = 2'-fluoro ribonucleotide
  modified_base 15: mod_base = OTHER; note = 2'-O-methyl ribonucleotide
  modified_base 16: mod_base = OTHER; note = 2'-fluoro ribonucleotide
  modified_base 17..23: mod_base = OTHER; note = 2'-O-methyl ribonucleotide
  modified_base 1..3: mod_base = OTHER; note = phosphorothioate linkage
  modified_base 21..23: mod_base = OTHER; note = phosphorothioate linkage
tagttgagggagttttgctggaa

SEQ ID NO: 304 - RNA, 23 nt, synthetic construct
  source 1..23: mol_type = other RNA
  modified_base 1: mod_base = OTHER; note = 2'-O-methyl ribonucleotide
  modified_base 2: mod_base = OTHER; note = 2'-fluoro ribonucleotide
  modified_base 3..6: mod_base = OTHER; note = 2'-O-methyl ribonucleotide
  modified_base 7: mod_base = OTHER; note = 2'-fluoro ribonucleotide
  modified_base 8..11: mod_base = OTHER; note = 2'-O-methyl ribonucleotide
  modified_base 12: mod_base = OTHER; note = 2'-fluoro ribonucleotide
  modified_base 13: mod_base = OTHER; note = 2'-O-methyl ribonucleotide
  modified_base 14: mod_base = OTHER; note = 2'-fluoro ribonucleotide
  modified_base 15: mod_base = OTHER; note = 2'-O-methyl ribonucleotide
  modified_base 16: mod_base = OTHER; note = 2'-fluoro ribonucleotide
  modified_base 17..23: mod_base = OTHER; note = 2'-O-methyl ribonucleotide
  modified_base 1..3: mod_base = OTHER; note = phosphorothioate linkage
  modified_base 21..23: mod_base = OTHER; note = phosphorothioate linkage
tcagttgagggagttttgctgga

SEQ ID NO: 305 - RNA, 23 nt, synthetic construct
  source 1..23: mol_type = other RNA
  modified_base 1: mod_base = OTHER; note = 2'-O-methyl ribonucleotide
  modified_base 2: mod_base = OTHER; note = 2'-fluoro ribonucleotide
  modified_base 3..6: mod_base = OTHER; note = 2'-O-methyl ribonucleotide
  modified_base 7: mod_base = OTHER; note = 2'-fluoro ribonucleotide
  modified_base 8..11: mod_base = OTHER; note = 2'-O-methyl ribonucleotide
  modified_base 12: mod_base = OTHER; note = 2'-fluoro ribonucleotide
  modified_base 13: mod_base = OTHER; note = 2'-O-methyl ribonucleotide
  modified_base 14: mod_base = OTHER; note = 2'-fluoro ribonucleotide
  modified_base 15: mod_base = OTHER; note = 2'-O-methyl ribonucleotide
  modified_base 16: mod_base = OTHER; note = 2'-fluoro ribonucleotide
  modified_base 17..23: mod_base = OTHER; note = 2'-O-methyl ribonucleotide
  modified_base 1..3: mod_base = OTHER; note = phosphorothioate linkage
  modified_base 21..23: mod_base = OTHER; note = phosphorothioate linkage
tccagttgagggagttttgctgg

SEQ ID NO: 306 - RNA, 23 nt, synthetic construct
  source 1..23: mol_type = other RNA
  modified_base 1: mod_base = OTHER; note = 2'-O-methyl ribonucleotide
  modified_base 2: mod_base = OTHER; note = 2'-fluoro ribonucleotide
  modified_base 3..6: mod_base = OTHER; note = 2'-O-methyl ribonucleotide
  modified_base 7: mod_base = OTHER; note = 2'-fluoro ribonucleotide
  modified_base 8..11: mod_base = OTHER; note = 2'-O-methyl ribonucleotide
  modified_base 12: mod_base = OTHER; note = 2'-fluoro ribonucleotide
  modified_base 13: mod_base = OTHER; note = 2'-O-methyl ribonucleotide
  modified_base 14: mod_base = OTHER; note = 2'-fluoro ribonucleotide
  modified_base 15: mod_base = OTHER; note = 2'-O-methyl ribonucleotide
  modified_base 16: mod_base = OTHER; note = 2'-fluoro ribonucleotide
  modified_base 17..23: mod_base = OTHER; note = 2'-O-methyl ribonucleotide
  modified_base 1..3: mod_base = OTHER; note = phosphorothioate linkage
  modified_base 21..23: mod_base = OTHER; note = phosphorothioate linkage
tggcatggtcaggtggatggtcc

SEQ ID NO: 307 - RNA, 23 nt, synthetic construct
  source 1..23: mol_type = other RNA
  modified_base 1: mod_base = OTHER; note = 2'-O-methyl ribonucleotide
  modified_base 2: mod_base = OTHER; note = 2'-fluoro ribonucleotide
  modified_base 3..6: mod_base = OTHER; note = 2'-O-methyl ribonucleotide
  modified_base 7: mod_base = OTHER; note = 2'-fluoro ribonucleotide
  modified_base 8..11: mod_base = OTHER; note = 2'-O-methyl ribonucleotide
  modified_base 12: mod_base = OTHER; note = 2'-fluoro ribonucleotide
  modified_base 13: mod_base = OTHER; note = 2'-O-methyl ribonucleotide
  modified_base 14: mod_base = OTHER; note = 2'-fluoro ribonucleotide
  modified_base 15: mod_base = OTHER; note = 2'-O-methyl ribonucleotide
  modified_base 16: mod_base = OTHER; note = 2'-fluoro ribonucleotide
  modified_base 17..23: mod_base = OTHER; note = 2'-O-methyl ribonucleotide
  modified_base 1..3: mod_base = OTHER; note = phosphorothioate linkage
  modified_base 21..23: mod_base = OTHER; note = phosphorothioate linkage
tcagttggggcatggtcaggtgg

SEQ ID NO: 308 - RNA, 23 nt, synthetic construct
  source 1..23: mol_type = other RNA
  modified_base 1: mod_base = OTHER; note = 2'-O-methyl ribonucleotide
  modified_base 2: mod_base = OTHER; note = 2'-fluoro ribonucleotide
  modified_base 3..6: mod_base = OTHER; note = 2'-O-methyl ribonucleotide
  modified_base 7: mod_base = OTHER; note = 2'-fluoro ribonucleotide
  modified_base 8..11: mod_base = OTHER; note = 2'-O-methyl ribonucleotide
  modified_base 12: mod_base = OTHER; note = 2'-fluoro ribonucleotide
  modified_base 13: mod_base = OTHER; note = 2'-O-methyl ribonucleotide
  modified_base 14: mod_base = OTHER; note = 2'-fluoro ribonucleotide
  modified_base 15: mod_base = OTHER; note = 2'-O-methyl ribonucleotide
  modified_base 16: mod_base = OTHER; note = 2'-fluoro ribonucleotide
  modified_base 17..23: mod_base = OTHER; note = 2'-O-methyl ribonucleotide
  modified_base 1..3: mod_base = OTHER; note = phosphorothioate linkage
  modified_base 21..23: mod_base = OTHER; note = phosphorothioate linkage
ttcggtgtgcagaatggcgggca

SEQ ID NO: 309 - RNA, 23 nt, synthetic construct
  source 1..23: mol_type = other RNA
  modified_base 1: mod_base = OTHER; note = 2'-O-methyl ribonucleotide
  modified_base 2: mod_base = OTHER; note = 2'-fluoro ribonucleotide
  modified_base 3..6: mod_base = OTHER; note = 2'-O-methyl ribonucleotide
  modified_base 7: mod_base = OTHER; note = 2'-fluoro ribonucleotide
  modified_base 8..11: mod_base = OTHER; note = 2'-O-methyl ribonucleotide
  modified_base 12: mod_base = OTHER; note = 2'-fluoro ribonucleotide
  modified_base 13: mod_base = OTHER; note = 2'-O-methyl ribonucleotide
  modified_base 14: mod_base = OTHER; note = 2'-fluoro ribonucleotide
  modified_base 15: mod_base = OTHER; note = 2'-O-methyl ribonucleotide
  modified_base 16: mod_base = OTHER; note = 2'-fluoro ribonucleotide
  modified_base 17..23: mod_base = OTHER; note = 2'-O-methyl ribonucleotide
  modified_base 1..3: mod_base = OTHER; note = phosphorothioate linkage
  modified_base 21..23: mod_base = OTHER; note = phosphorothioate linkage
tttgcaggttcagctcggtgtgc

SEQ ID NO: 310 - RNA, 23 nt, synthetic construct
  source 1..23: mol_type = other RNA
  modified_base 1: mod_base = OTHER; note = 2'-O-methyl ribonucleotide
  modified_base 2: mod_base = OTHER; note = 2'-fluoro ribonucleotide
  modified_base 3..6: mod_base = OTHER; note = 2'-O-methyl ribonucleotide
  modified_base 7: mod_base = OTHER; note = 2'-fluoro ribonucleotide
  modified_base 8..11: mod_base = OTHER; note = 2'-O-methyl ribonucleotide
  modified_base 12: mod_base = OTHER; note = 2'-fluoro ribonucleotide
  modified_base 13: mod_base = OTHER; note = 2'-O-methyl ribonucleotide
  modified_base 14: mod_base = OTHER; note = 2'-fluoro ribonucleotide
  modified_base 15: mod_base = OTHER; note = 2'-O-methyl ribonucleotide
  modified_base 16: mod_base = OTHER; note = 2'-fluoro ribonucleotide
  modified_base 17..23: mod_base = OTHER; note = 2'-O-methyl ribonucleotide
  modified_base 1..3: mod_base = OTHER; note = phosphorothioate linkage
  modified_base 21..23: mod_base = OTHER; note = phosphorothioate linkage
tatttttgcaggttcagctcggt

SEQ ID NO: 311 - RNA, 23 nt, synthetic construct
  source 1..23: mol_type = other RNA
  modified_base 1: mod_base = OTHER; note = 2'-O-methyl ribonucleotide
  modified_base 2: mod_base = OTHER; note = 2'-fluoro ribonucleotide
  modified_base 3..6: mod_base = OTHER; note = 2'-O-methyl ribonucleotide
  modified_base 7: mod_base = OTHER; note = 2'-fluoro ribonucleotide
  modified_base 8..11: mod_base = OTHER; note = 2'-O-methyl ribonucleotide
  modified_base 12: mod_base = OTHER; note = 2'-fluoro ribonucleotide
  modified_base 13: mod_base = OTHER; note = 2'-O-methyl ribonucleotide
  modified_base 14: mod_base = OTHER; note = 2'-fluoro ribonucleotide
  modified_base 15: mod_base = OTHER; note = 2'-O-methyl ribonucleotide
  modified_base 16: mod_base = OTHER; note = 2'-fluoro ribonucleotide
  modified_base 17..23: mod_base = OTHER; note = 2'-O-methyl ribonucleotide
  modified_base 1..3: mod_base = OTHER; note = phosphorothioate linkage
  modified_base 21..23: mod_base = OTHER; note = phosphorothioate linkage
ttcaatttttgcaggttcagctc

SEQ ID NO: 312 - RNA, 23 nt, synthetic construct
  source 1..23: mol_type = other RNA
  modified_base 1: mod_base = OTHER; note = 2'-O-methyl ribonucleotide
  modified_base 2: mod_base = OTHER; note = 2'-fluoro ribonucleotide
  modified_base 3..6: mod_base = OTHER; note = 2'-O-methyl ribonucleotide
  modified_base 7: mod_base = OTHER; note = 2'-fluoro ribonucleotide
  modified_base 8..11: mod_base = OTHER; note = 2'-O-methyl ribonucleotide
  modified_base 12: mod_base = OTHER; note = 2'-fluoro ribonucleotide
  modified_base 13: mod_base = OTHER; note = 2'-O-methyl ribonucleotide
  modified_base 14: mod_base = OTHER; note = 2'-fluoro ribonucleotide
  modified_base 15: mod_base = OTHER; note = 2'-O-methyl ribonucleotide
  modified_base 16: mod_base = OTHER; note = 2'-fluoro ribonucleotide
  modified_base 17..23: mod_base = OTHER; note = 2'-O-methyl ribonucleotide
  modified_base 1..3: mod_base = OTHER; note = phosphorothioate linkage
  modified_base 21..23: mod_base = OTHER; note = phosphorothioate linkage
ttgcggtcattgctcaatttttg

SEQ ID NO: 313 - RNA, 23 nt, synthetic construct
  source 1..23: mol_type = other RNA
  modified_base 1: mod_base = OTHER; note = 2'-O-methyl ribonucleotide
  modified_base 2: mod_base = OTHER; note = 2'-fluoro ribonucleotide
  modified_base 3..6: mod_base = OTHER; note = 2'-O-methyl ribonucleotide
  modified_base 7: mod_base = OTHER; note = 2'-fluoro ribonucleotide
  modified_base 8..11: mod_base = OTHER; note = 2'-O-methyl ribonucleotide
  modified_base 12: mod_base = OTHER; note = 2'-fluoro ribonucleotide
  modified_base 13: mod_base = OTHER; note = 2'-O-methyl ribonucleotide
  modified_base 14: mod_base = OTHER; note = 2'-fluoro ribonucleotide
  modified_base 15: mod_base = OTHER; note = 2'-O-methyl ribonucleotide
  modified_base 16: mod_base = OTHER; note = 2'-fluoro ribonucleotide
  modified_base 17..23: mod_base = OTHER; note = 2'-O-methyl ribonucleotide
  modified_base 1..3: mod_base = OTHER; note = phosphorothioate linkage
  modified_base 21..23: mod_base = OTHER; note = phosphorothioate linkage
ttgggtagactctgtgggctctc

SEQ ID NO: 314 - RNA, 23 nt, synthetic construct
  source 1..23: mol_type = other RNA
  modified_base 1: mod_base = OTHER; note = 2'-O-methyl ribonucleotide
  modified_base 2: mod_base = OTHER; note = 2'-fluoro ribonucleotide
  modified_base 3..6: mod_base = OTHER; note = 2'-O-methyl ribonucleotide
  modified_base 7: mod_base = OTHER; note = 2'-fluoro ribonucleotide
  modified_base 8..11: mod_base = OTHER; note = 2'-O-methyl ribonucleotide
  modified_base 12: mod_base = OTHER; note = 2'-fluoro ribonucleotide
  modified_base 13: mod_base = OTHER; note = 2'-O-methyl ribonucleotide
  modified_base 14: mod_base = OTHER; note = 2'-fluoro ribonucleotide
  modified_base 15: mod_base = OTHER; note = 2'-O-methyl ribonucleotide
  modified_base 16: mod_base = OTHER; note = 2'-fluoro ribonucleotide
  modified_base 17..23: mod_base = OTHER; note = 2'-O-methyl ribonucleotide
  modified_base 1..3: mod_base = OTHER; note = phosphorothioate linkage
  modified_base 21..23: mod_base = OTHER; note = phosphorothioate linkage
tttgggtagactctgtgggctct

SEQ ID NO: 315 - RNA, 23 nt, synthetic construct
  source 1..23: mol_type = other RNA
  modified_base 1: mod_base = OTHER; note = 2'-O-methyl ribonucleotide
  modified_base 2: mod_base = OTHER; note = 2'-fluoro ribonucleotide
  modified_base 3..6: mod_base = OTHER; note = 2'-O-methyl ribonucleotide
  modified_base 7: mod_base = OTHER; note = 2'-fluoro ribonucleotide
  modified_base 8..11: mod_base = OTHER; note = 2'-O-methyl ribonucleotide
  modified_base 12: mod_base = OTHER; note = 2'-fluoro ribonucleotide
  modified_base 13: mod_base = OTHER; note = 2'-O-methyl ribonucleotide
  modified_base 14: mod_base = OTHER; note = 2'-fluoro ribonucleotide
  modified_base 15: mod_base = OTHER; note = 2'-O-methyl ribonucleotide
  modified_base 16: mod_base = OTHER; note = 2'-fluoro ribonucleotide
  modified_base 17..23: mod_base = OTHER; note = 2'-O-methyl ribonucleotide
  modified_base 1..3: mod_base = OTHER; note = phosphorothioate linkage
  modified_base 21..23: mod_base = OTHER; note = phosphorothioate linkage
tgctgttgggtagactctgtggg

SEQ ID NO: 316 - RNA, 23 nt, synthetic construct
  source 1..23: mol_type = other RNA
  modified_base 1: mod_base = OTHER; note = 2'-O-methyl ribonucleotide
  modified_base 2: mod_base = OTHER; note = 2'-fluoro ribonucleotide
  modified_base 3..6: mod_base = OTHER; note = 2'-O-methyl ribonucleotide
  modified_base 7: mod_base = OTHER; note = 2'-fluoro ribonucleotide
  modified_base 8..11: mod_base = OTHER; note = 2'-O-methyl ribonucleotide
  modified_base 12: mod_base = OTHER; note = 2'-fluoro ribonucleotide
  modified_base 13: mod_base = OTHER; note = 2'-O-methyl ribonucleotide
  modified_base 14: mod_base = OTHER; note = 2'-fluoro ribonucleotide
  modified_base 15: mod_base = OTHER; note = 2'-O-methyl ribonucleotide
  modified_base 16: mod_base = OTHER; note = 2'-fluoro ribonucleotide
  modified_base 17..23: mod_base = OTHER; note = 2'-O-methyl ribonucleotide
  modified_base 1..3: mod_base = OTHER; note = phosphorothioate linkage
  modified_base 21..23: mod_base = OTHER; note = phosphorothioate linkage
tgggcggttcagggtcacctcca

SEQ ID NO: 317 - RNA, 23 nt, synthetic construct
  source 1..23: mol_type = other RNA
  modified_base 1: mod_base = OTHER; note = 2'-O-methyl ribonucleotide
  modified_base 2: mod_base = OTHER; note = 2'-fluoro ribonucleotide
  modified_base 3..6: mod_base = OTHER; note = 2'-O-methyl ribonucleotide
  modified_base 7: mod_base = OTHER; note = 2'-fluoro ribonucleotide
  modified_base 8..11: mod_base = OTHER; note = 2'-O-methyl ribonucleotide
  modified_base 12: mod_base = OTHER; note = 2'-fluoro ribonucleotide
  modified_base 13: mod_base = OTHER; note = 2'-O-methyl ribonucleotide
  modified_base 14: mod_base = OTHER; note = 2'-fluoro ribonucleotide
  modified_base 15: mod_base = OTHER; note = 2'-O-methyl ribonucleotide
  modified_base 16: mod_base = OTHER; note = 2'-fluoro ribonucleotide
  modified_base 17..23: mod_base = OTHER; note = 2'-O-methyl ribonucleotide
  modified_base 1..3: mod_base = OTHER; note = phosphorothioate linkage
  modified_base 21..23: mod_base = OTHER; note = phosphorothioate linkage
tatgggcggttcagggtcacctc

SEQ ID NO: 318 - RNA, 23 nt, synthetic construct
  source 1..23: mol_type = other RNA
  modified_base 1: mod_base = OTHER; note = 2'-O-methyl ribonucleotide
  modified_base 2: mod_base = OTHER; note = 2'-fluoro ribonucleotide
  modified_base 3..6: mod_base = OTHER; note = 2'-O-methyl ribonucleotide
  modified_base 7: mod_base = OTHER; note = 2'-fluoro ribonucleotide
  modified_base 8..11: mod_base = OTHER; note = 2'-O-methyl ribonucleotide
  modified_base 12: mod_base = OTHER; note = 2'-fluoro ribonucleotide
  modified_base 13: mod_base = OTHER; note = 2'-O-methyl ribonucleotide
  modified_base 14: mod_base = OTHER; note = 2'-fluoro ribonucleotide
  modified_base 15: mod_base = OTHER; note = 2'-O-methyl ribonucleotide
  modified_base 16: mod_base = OTHER; note = 2'-fluoro ribonucleotide
  modified_base 17..23: mod_base = OTHER; note = 2'-O-methyl ribonucleotide
  modified_base 1..3: mod_base = OTHER; note = phosphorothioate linkage
  modified_base 21..23: mod_base = OTHER; note = phosphorothioate linkage
taatgggcggttcagggtcacct

SEQ ID NO: 319 - RNA, 23 nt, synthetic construct
  source 1..23: mol_type = other RNA
  modified_base 1: mod_base = OTHER; note = 2'-O-methyl ribonucleotide
  modified_base 2: mod_base = OTHER; note = 2'-fluoro ribonucleotide
  modified_base 3..6: mod_base = OTHER; note = 2'-O-methyl ribonucleotide
  modified_base 7: mod_base = OTHER; note = 2'-fluoro ribonucleotide
  modified_base 8..11: mod_base = OTHER; note = 2'-O-methyl ribonucleotide
  modified_base 12: mod_base = OTHER; note = 2'-fluoro ribonucleotide
  modified_base 13: mod_base = OTHER; note = 2'-O-methyl ribonucleotide
  modified_base 14: mod_base = OTHER; note = 2'-fluoro ribonucleotide
  modified_base 15: mod_base = OTHER; note = 2'-O-methyl ribonucleotide
  modified_base 16: mod_base = OTHER; note = 2'-fluoro ribonucleotide
  modified_base 17..23: mod_base = OTHER; note = 2'-O-methyl ribonucleotide
  modified_base 1..3: mod_base = OTHER; note = phosphorothioate linkage
  modified_base 21..23: mod_base = OTHER; note = phosphorothioate linkage
tacaggaatgggcggttcagggt

SEQ ID NO: 320 - RNA, 23 nt, synthetic construct
  source 1..23: mol_type = other RNA
  modified_base 1: mod_base = OTHER; note = 2'-O-methyl ribonucleotide
  modified_base 2: mod_base = OTHER; note = 2'-fluoro ribonucleotide
  modified_base 3..6: mod_base = OTHER; note = 2'-O-methyl ribonucleotide
  modified_base 7: mod_base = OTHER; note = 2'-fluoro ribonucleotide
  modified_base 8..11: mod_base = OTHER; note = 2'-O-methyl ribonucleotide
  modified_base 12: mod_base = OTHER; note = 2'-fluoro ribonucleotide
  modified_base 13: mod_base = OTHER; note = 2'-O-methyl ribonucleotide
  modified_base 14: mod_base = OTHER; note = 2'-fluoro ribonucleotide
  modified_base 15: mod_base = OTHER; note = 2'-O-methyl ribonucleotide
  modified_base 16: mod_base = OTHER; note = 2'-fluoro ribonucleotide
  modified_base 17..23: mod_base = OTHER; note = 2'-O-methyl ribonucleotide
  modified_base 1..3: mod_base = OTHER; note = phosphorothioate linkage
  modified_base 21..23: mod_base = OTHER; note = phosphorothioate linkage
taacaggaatgggcggttcaggg

SEQ ID NO: 321 - RNA, 23 nt, synthetic construct
  source 1..23: mol_type = other RNA
  modified_base 1: mod_base = OTHER; note = 2'-O-methyl ribonucleotide
  modified_base 2: mod_base = OTHER; note = 2'-fluoro ribonucleotide
  modified_base 3..6: mod_base = OTHER; note = 2'-O-methyl ribonucleotide
  modified_base 7: mod_base = OTHER; note = 2'-fluoro ribonucleotide
  modified_base 8..11: mod_base = OTHER; note = 2'-O-methyl ribonucleotide
  modified_base 12: mod_base = OTHER; note = 2'-fluoro ribonucleotide
  modified_base 13: mod_base = OTHER; note = 2'-O-methyl ribonucleotide
  modified_base 14: mod_base = OTHER; note = 2'-fluoro ribonucleotide
  modified_base 15: mod_base = OTHER; note = 2'-O-methyl ribonucleotide
  modified_base 16: mod_base = OTHER; note = 2'-fluoro ribonucleotide
  modified_base 17..23: mod_base = OTHER; note = 2'-O-methyl ribonucleotide
  modified_base 1..3: mod_base = OTHER; note = phosphorothioate linkage
  modified_base 21..23: mod_base = OTHER; note = phosphorothioate linkage
tcaaacaggaatgggcggttcag

SEQ ID NO: 322 - RNA, 23 nt, synthetic construct
  source 1..23: mol_type = other RNA
  modified_base 1: mod_base = OTHER; note = 2'-O-methyl ribonucleotide
  modified_base 2: mod_base = OTHER; note = 2'-fluoro ribonucleotide
  modified_base 3..6: mod_base = OTHER; note = 2'-O-methyl ribonucleotide
  modified_base 7: mod_base = OTHER; note = 2'-fluoro ribonucleotide
  modified_base 8..11: mod_base = OTHER; note = 2'-O-methyl ribonucleotide
  modified_base 12: mod_base = OTHER; note = 2'-fluoro ribonucleotide
  modified_base 13: mod_base = OTHER; note = 2'-O-methyl ribonucleotide
  modified_base 14: mod_base = OTHER; note = 2'-fluoro ribonucleotide
  modified_base 15: mod_base = OTHER; note = 2'-O-methyl ribonucleotide
  modified_base 16: mod_base = OTHER; note = 2'-fluoro ribonucleotide
  modified_base 17..23: mod_base = OTHER; note = 2'-O-methyl ribonucleotide
  modified_base 1..3: mod_base = OTHER; note = phosphorothioate linkage
  modified_base 21..23: mod_base = OTHER; note = phosphorothioate linkage
tgcaaacaggaatgggcggttca

SEQ ID NO: 323 - RNA, 23 nt, synthetic construct
  source 1..23: mol_type = other RNA
  modified_base 1: mod_base = OTHER; note = 2'-O-methyl ribonucleotide
  modified_base 2: mod_base = OTHER; note = 2'-fluoro ribonucleotide
  modified_base 3..6: mod_base = OTHER; note = 2'-O-methyl ribonucleotide
  modified_base 7: mod_base = OTHER; note = 2'-fluoro ribonucleotide
  modified_base 8..11: mod_base = OTHER; note = 2'-O-methyl ribonucleotide
  modified_base 12: mod_base = OTHER; note = 2'-fluoro ribonucleotide
  modified_base 13: mod_base = OTHER; note = 2'-O-methyl ribonucleotide
  modified_base 14: mod_base = OTHER; note = 2'-fluoro ribonucleotide
  modified_base 15: mod_base = OTHER; note = 2'-O-methyl ribonucleotide
  modified_base 16: mod_base = OTHER; note = 2'-fluoro ribonucleotide
  modified_base 17..23: mod_base = OTHER; note = 2'-O-methyl ribonucleotide
  modified_base 1..3: mod_base = OTHER; note = phosphorothioate linkage
  modified_base 21..23: mod_base = OTHER; note = phosphorothioate linkage
tagcaaacaggaatgggcggttc

SEQ ID NO: 324 - RNA, 23 nt, synthetic construct
  source 1..23: mol_type = other RNA
  modified_base 1: mod_base = OTHER; note = 2'-O-methyl ribonucleotide
  modified_base 2: mod_base = OTHER; note = 2'-fluoro ribonucleotide
  modified_base 3..6: mod_base = OTHER; note = 2'-O-methyl ribonucleotide
  modified_base 7: mod_base = OTHER; note = 2'-fluoro ribonucleotide
  modified_base 8..11: mod_base = OTHER; note = 2'-O-methyl ribonucleotide
  modified_base 12: mod_base = OTHER; note = 2'-fluoro ribonucleotide
  modified_base 13: mod_base = OTHER; note = 2'-O-methyl ribonucleotide
  modified_base 14: mod_base = OTHER; note = 2'-fluoro ribonucleotide
  modified_base 15: mod_base = OTHER; note = 2'-O-methyl ribonucleotide
  modified_base 16: mod_base = OTHER; note = 2'-fluoro ribonucleotide
  modified_base 17..23: mod_base = OTHER; note = 2'-O-methyl ribonucleotide
  modified_base 1..3: mod_base = OTHER; note = phosphorothioate linkage
  modified_base 21..23: mod_base = OTHER; note = phosphorothioate linkage
tgatcatacacagcaaacaggaa

SEQ ID NO: 325 - RNA, 23 nt, synthetic construct
  source 1..23: mol_type = other RNA
  modified_base 1: mod_base = OTHER; note = 2'-O-methyl ribonucleotide
  modified_base 2: mod_base = OTHER; note = 2'-fluoro ribonucleotide
  modified_base 3..6: mod_base = OTHER; note = 2'-O-methyl ribonucleotide
  modified_base 7: mod_base = OTHER; note = 2'-fluoro ribonucleotide
  modified_base 8..11: mod_base = OTHER; note = 2'-O-methyl ribonucleotide
  modified_base 12: mod_base = OTHER; note = 2'-fluoro ribonucleotide
  modified_base 13: mod_base = OTHER; note = 2'-O-methyl ribonucleotide
  modified_base 14: mod_base = OTHER; note = 2'-fluoro ribonucleotide
  modified_base 15: mod_base = OTHER; note = 2'-O-methyl ribonucleotide
  modified_base 16: mod_base = OTHER; note = 2'-fluoro ribonucleotide
  modified_base 17..23: mod_base = OTHER; note = 2'-O-methyl ribonucleotide
  modified_base 1..3: mod_base = OTHER; note = phosphorothioate linkage
  modified_base 21..23: mod_base = OTHER; note = phosphorothioate linkage
tcgctttgatcatacacagcaaa

SEQ ID NO: 326 - RNA, 23 nt, synthetic construct
  source 1..23: mol_type = other RNA
  modified_base 1: mod_base = OTHER; note = 2'-O-methyl ribonucleotide
  modified_base 2: mod_base = OTHER; note = 2'-fluoro ribonucleotide
  modified_base 3..6: mod_base = OTHER; note = 2'-O-methyl ribonucleotide
  modified_base 7: mod_base = OTHER; note = 2'-fluoro ribonucleotide
  modified_base 8..11: mod_base = OTHER; note = 2'-O-methyl ribonucleotide
  modified_base 12: mod_base = OTHER; note = 2'-fluoro ribonucleotide
  modified_base 13: mod_base = OTHER; note = 2'-O-methyl ribonucleotide
  modified_base 14: mod_base = OTHER; note = 2'-fluoro ribonucleotide
  modified_base 15: mod_base = OTHER; note = 2'-O-methyl ribonucleotide
  modified_base 16: mod_base = OTHER; note = 2'-fluoro ribonucleotide
  modified_base 17..23: mod_base = OTHER; note = 2'-O-methyl ribonucleotide
  modified_base 1..3: mod_base = OTHER; note = phosphorothioate linkage
  modified_base 21..23: mod_base = OTHER; note = phosphorothioate linkage
tgcgctttgatcatacacagcaa

SEQ ID NO: 327 - RNA, 23 nt, synthetic construct
  source 1..23: mol_type = other RNA
  modified_base 1: mod_base = OTHER; note = 2'-O-methyl ribonucleotide
  modified_base 2: mod_base = OTHER; note = 2'-fluoro ribonucleotide
  modified_base 3..6: mod_base = OTHER; note = 2'-O-methyl ribonucleotide
  modified_base 7: mod_base = OTHER; note = 2'-fluoro ribonucleotide
  modified_base 8..11: mod_base = OTHER; note = 2'-O-methyl ribonucleotide
  modified_base 12: mod_base = OTHER; note = 2'-fluoro ribonucleotide
  modified_base 13: mod_base = OTHER; note = 2'-O-methyl ribonucleotide
  modified_base 14: mod_base = OTHER; note = 2'-fluoro ribonucleotide
  modified_base 15: mod_base = OTHER; note = 2'-O-methyl ribonucleotide
  modified_base 16: mod_base = OTHER; note = 2'-fluoro ribonucleotide
  modified_base 17..23: mod_base = OTHER; note = 2'-O-methyl ribonucleotide
  modified_base 1..3: mod_base = OTHER; note = phosphorothioate linkage
  modified_base 21..23: mod_base = OTHER; note = phosphorothioate linkage
tggcgctttgatcatacacagca

SEQ ID NO: 328 - RNA, 23 nt, synthetic construct
  source 1..23: mol_type = other RNA
  modified_base 1: mod_base = OTHER; note = 2'-O-methyl ribonucleotide
  modified_base 2: mod_base = OTHER; note = 2'-fluoro ribonucleotide
  modified_base 3..6: mod_base = OTHER; note = 2'-O-methyl ribonucleotide
  modified_base 7: mod_base = OTHER; note = 2'-fluoro ribonucleotide
  modified_base 8..11: mod_base = OTHER; note = 2'-O-methyl ribonucleotide
  modified_base 12: mod_base = OTHER; note = 2'-fluoro ribonucleotide
  modified_base 13: mod_base = OTHER; note = 2'-O-methyl ribonucleotide
  modified_base 14: mod_base = OTHER; note = 2'-fluoro ribonucleotide
  modified_base 15: mod_base = OTHER; note = 2'-O-methyl ribonucleotide
  modified_base 16: mod_base = OTHER; note = 2'-fluoro ribonucleotide
  modified_base 17..23: mod_base = OTHER; note = 2'-O-methyl ribonucleotide
  modified_base 1..3: mod_base = OTHER; note = phosphorothioate linkage
  modified_base 21..23: mod_base = OTHER; note = phosphorothioate linkage
tagtggcgctttgatcatacaca

SEQ ID NO: 329 - RNA, 23 nt, synthetic construct
  source 1..23: mol_type = other RNA
  modified_base 1: mod_base = OTHER; note = 2'-O-methyl ribonucleotide
  modified_base 2: mod_base = OTHER; note = 2'-fluoro ribonucleotide
  modified_base 3..6: mod_base = OTHER; note = 2'-O-methyl ribonucleotide
  modified_base 7: mod_base = OTHER; note = 2'-fluoro ribonucleotide
  modified_base 8..11: mod_base = OTHER; note = 2'-O-methyl ribonucleotide
  modified_base 12: mod_base = OTHER; note = 2'-fluoro ribonucleotide
  modified_base 13: mod_base = OTHER; note = 2'-O-methyl ribonucleotide
  modified_base 14: mod_base = OTHER; note = 2'-fluoro ribonucleotide
  modified_base 15: mod_base = OTHER; note = 2'-O-methyl ribonucleotide
  modified_base 16: mod_base = OTHER; note = 2'-fluoro ribonucleotide
  modified_base 17..23: mod_base = OTHER; note = 2'-O-methyl ribonucleotide
  modified_base 1..3: mod_base = OTHER; note = phosphorothioate linkage
  modified_base 21..23: mod_base = OTHER; note = phosphorothioate linkage
tgcagtggcgctttgatcataca

SEQ ID NO: 330 - RNA, 23 nt, synthetic construct
  source 1..23: mol_type = other RNA
  modified_base 1: mod_base = OTHER; note = 2'-O-methyl ribonucleotide
  modified_base 2: mod_base = OTHER; note = 2'-fluoro ribonucleotide
  modified_base 3..6: mod_base = OTHER; note = 2'-O-methyl ribonucleotide
  modified_base 7: mod_base = OTHER; note = 2'-fluoro ribonucleotide
  modified_base 8..11: mod_base = OTHER; note = 2'-O-methyl ribonucleotide
  modified_base 12: mod_base = OTHER; note = 2'-fluoro ribonucleotide
  modified_base 13: mod_base = OTHER; note = 2'-O-methyl ribonucleotide
  modified_base 14: mod_base = OTHER; note = 2'-fluoro ribonucleotide
  modified_base 15: mod_base = OTHER; note = 2'-O-methyl ribonucleotide
  modified_base 16: mod_base = OTHER; note = 2'-fluoro ribonucleotide
  modified_base 17..23: mod_base = OTHER; note = 2'-O-methyl ribonucleotide
  modified_base 1..3: mod_base = OTHER; note = phosphorothioate linkage
  modified_base 21..23: mod_base = OTHER; note = phosphorothioate linkage
tgggcagtggcgctttgatcata

SEQ ID NO: 331 - RNA, 23 nt, synthetic construct
  source 1..23: mol_type = other RNA
  modified_base 1: mod_base = OTHER; note = 2'-O-methyl ribonucleotide
  modified_base 2: mod_base = OTHER; note = 2'-fluoro ribonucleotide
  modified_base 3..6: mod_base = OTHER; note = 2'-O-methyl ribonucleotide
  modified_base 7: mod_base = OTHER; note = 2'-fluoro ribonucleotide
  modified_base 8..11: mod_base = OTHER; note = 2'-O-methyl ribonucleotide
  modified_base 12: mod_base = OTHER; note = 2'-fluoro ribonucleotide
  modified_base 13: mod_base = OTHER; note = 2'-O-methyl ribonucleotide
  modified_base 14: mod_base = OTHER; note = 2'-fluoro ribonucleotide
  modified_base 15: mod_base = OTHER; note = 2'-O-methyl ribonucleotide
  modified_base 16: mod_base = OTHER; note = 2'-fluoro ribonucleotide
  modified_base 17..23: mod_base = OTHER; note = 2'-O-methyl ribonucleotide
  modified_base 1..3: mod_base = OTHER; note = phosphorothioate linkage
  modified_base 21..23: mod_base = OTHER; note = phosphorothioate linkage
tagggcagtggcgctttgatcat

SEQ ID NO: 332 - RNA, 23 nt, synthetic construct
  source 1..23: mol_type = other RNA
  modified_base 1: mod_base = OTHER; note = 2'-O-methyl ribonucleotide
  modified_base 2: mod_base = OTHER; note = 2'-fluoro ribonucleotide
  modified_base 3..6: mod_base = OTHER; note = 2'-O-methyl ribonucleotide
  modified_base 7: mod_base = OTHER; note = 2'-fluoro ribonucleotide
  modified_base 8..11: mod_base = OTHER; note = 2'-O-methyl ribonucleotide
  modified_base 12: mod_base = OTHER; note = 2'-fluoro ribonucleotide
  modified_base 13: mod_base = OTHER; note = 2'-O-methyl ribonucleotide
  modified_base 14: mod_base = OTHER; note = 2'-fluoro ribonucleotide
  modified_base 15: mod_base = OTHER; note = 2'-O-methyl ribonucleotide
  modified_base 16: mod_base = OTHER; note = 2'-fluoro ribonucleotide
  modified_base 17..23: mod_base = OTHER; note = 2'-O-methyl ribonucleotide
  modified_base 1..3: mod_base = OTHER; note = phosphorothioate linkage
  modified_base 21..23: mod_base = OTHER; note = phosphorothioate linkage
tcagggcagtggcgctttgatca

SEQ ID NO: 333 - RNA, 23 nt, synthetic construct
  source 1..23: mol_type = other RNA
  modified_base 1: mod_base = OTHER; note = 2'-O-methyl ribonucleotide
  modified_base 2: mod_base = OTHER; note = 2'-fluoro ribonucleotide
  modified_base 3..6: mod_base = OTHER; note = 2'-O-methyl ribonucleotide
  modified_base 7: mod_base = OTHER; note = 2'-fluoro ribonucleotide
  modified_base 8..11: mod_base = OTHER; note = 2'-O-methyl ribonucleotide
  modified_base 12: mod_base = OTHER; note = 2'-fluoro ribonucleotide
  modified_base 13: mod_base = OTHER; note = 2'-O-methyl ribonucleotide
  modified_base 14: mod_base = OTHER; note = 2'-fluoro ribonucleotide
  modified_base 15: mod_base = OTHER; note = 2'-O-methyl ribonucleotide
  modified_base 16: mod_base = OTHER; note = 2'-fluoro ribonucleotide
  modified_base 17..23: mod_base = OTHER; note = 2'-O-methyl ribonucleotide
  modified_base 1..3: mod_base = OTHER; note = phosphorothioate linkage
  modified_base 21..23: mod_base = OTHER; note = phosphorothioate linkage
tagcgggttggccacgcggccca

SEQ ID NO: 334 - RNA, 23 nt, synthetic construct
  source 1..23: mol_type = other RNA
  modified_base 1: mod_base = OTHER; note = 2'-O-methyl ribonucleotide
  modified_base 2: mod_base = OTHER; note = 2'-fluoro ribonucleotide
  modified_base 3..6: mod_base = OTHER; note = 2'-O-methyl ribonucleotide
  modified_base 7: mod_base = OTHER; note = 2'-fluoro ribonucleotide
  modified_base 8..11: mod_base = OTHER; note = 2'-O-methyl ribonucleotide
  modified_base 12: mod_base = OTHER; note = 2'-fluoro ribonucleotide
  modified_base 13: mod_base = OTHER; note = 2'-O-methyl ribonucleotide
  modified_base 14: mod_base = OTHER; note = 2'-fluoro ribonucleotide
  modified_base 15: mod_base = OTHER; note = 2'-O-methyl ribonucleotide
  modified_base 16: mod_base = OTHER; note = 2'-fluoro ribonucleotide
  modified_base 17..23: mod_base = OTHER; note = 2'-O-methyl ribonucleotide
  modified_base 1..3: mod_base = OTHER; note = phosphorothioate linkage
  modified_base 21..23: mod_base = OTHER; note = phosphorothioate linkage
ttcatgctgtgctcagcgggttg

SEQ ID NO: 335 - RNA, 23 nt, synthetic construct
  source 1..23: mol_type = other RNA
  modified_base 1: mod_base = OTHER; note = 2'-O-methyl ribonucleotide
  modified_base 2: mod_base = OTHER; note = 2'-fluoro ribonucleotide
  modified_base 3..6: mod_base = OTHER; note = 2'-O-methyl ribonucleotide
  modified_base 7: mod_base = OTHER; note = 2'-fluoro ribonucleotide
  modified_base 8..11: mod_base = OTHER; note = 2'-O-methyl ribonucleotide
  modified_base 12: mod_base = OTHER; note = 2'-fluoro ribonucleotide
  modified_base 13: mod_base = OTHER; note = 2'-O-methyl ribonucleotide
  modified_base 14: mod_base = OTHER; note = 2'-fluoro ribonucleotide
  modified_base 15: mod_base = OTHER; note = 2'-O-methyl ribonucleotide
  modified_base 16: mod_base = OTHER; note = 2'-fluoro ribonucleotide
  modified_base 17..23: mod_base = OTHER; note = 2'-O-methyl ribonucleotide
  modified_base 1..3: mod_base = OTHER; note = phosphorothioate linkage
  modified_base 21..23: mod_base = OTHER; note = phosphorothioate linkage
tctggcctttgcctcaaaggcca

SEQ ID NO: 336 - RNA, 23 nt, synthetic construct
  source 1..23: mol_type = other RNA
  modified_base 1: mod_base = OTHER; note = 2'-O-methyl ribonucleotide
  modified_base 2: mod_base = OTHER; note = 2'-fluoro ribonucleotide
  modified_base 3..6: mod_base = OTHER; note = 2'-O-methyl ribonucleotide
  modified_base 7: mod_base = OTHER; note = 2'-fluoro ribonucleotide
  modified_base 8..11: mod_base = OTHER; note = 2'-O-methyl ribonucleotide
  modified_base 12: mod_base = OTHER; note = 2'-fluoro ribonucleotide
  modified_base 13: mod_base = OTHER; note = 2'-O-methyl ribonucleotide
  modified_base 14: mod_base = OTHER; note = 2'-fluoro ribonucleotide
  modified_base 15: mod_base = OTHER; note = 2'-O-methyl ribonucleotide
  modified_base 16: mod_base = OTHER; note = 2'-fluoro ribonucleotide
  modified_base 17..23: mod_base = OTHER; note = 2'-O-methyl ribonucleotide
  modified_base 1..3: mod_base = OTHER; note = phosphorothioate linkage
  modified_base 21..23: mod_base = OTHER; note = phosphorothioate linkage
tgctggcctttgcctcaaaggcc

SEQ ID NO: 337 - RNA, 23 nt, synthetic construct
  source 1..23: mol_type = other RNA
  modified_base 1: mod_base = OTHER; note = 2'-O-methyl ribonucleotide
  modified_base 2: mod_base = OTHER; note = 2'-fluoro ribonucleotide
  modified_base 3..6: mod_base = OTHER; note = 2'-O-methyl ribonucleotide
  modified_base 7: mod_base = OTHER; note = 2'-fluoro ribonucleotide
  modified_base 8..11: mod_base = OTHER; note = 2'-O-methyl ribonucleotide
  modified_base 12: mod_base = OTHER; note = 2'-fluoro ribonucleotide
  modified_base 13: mod_base = OTHER; note = 2'-O-methyl ribonucleotide
  modified_base 14: mod_base = OTHER; note = 2'-fluoro ribonucleotide
  modified_base 15: mod_base = OTHER; note = 2'-O-methyl ribonucleotide
  modified_base 16: mod_base = OTHER; note = 2'-fluoro ribonucleotide
  modified_base 17..23: mod_base = OTHER; note = 2'-O-methyl ribonucleotide
  modified_base 1..3: mod_base = OTHER; note = phosphorothioate linkage
  modified_base 21..23: mod_base = OTHER; note = phosphorothioate linkage
ttgtccggggttgttatctgctg

SEQ ID NO: 338 - RNA, 23 nt, synthetic construct
  source 1..23: mol_type = other RNA
  modified_base 1: mod_base = OTHER; note = 2'-O-methyl ribonucleotide
  modified_base 2: mod_base = OTHER; note = 2'-fluoro ribonucleotide
  modified_base 3..6: mod_base = OTHER; note = 2'-O-methyl ribonucleotide
  modified_base 7: mod_base = OTHER; note = 2'-fluoro ribonucleotide
  modified_base 8..11: mod_base = OTHER; note = 2'-O-methyl ribonucleotide
  modified_base 12: mod_base = OTHER; note = 2'-fluoro ribonucleotide
  modified_base 13: mod_base = OTHER; note = 2'-O-methyl ribonucleotide
  modified_base 14: mod_base = OTHER; note = 2'-fluoro ribonucleotide
  modified_base 15: mod_base = OTHER; note = 2'-O-methyl ribonucleotide
  modified_base 16: mod_base = OTHER; note = 2'-fluoro ribonucleotide
  modified_base 17..23: mod_base = OTHER; note = 2'-O-methyl ribonucleotide
  modified_base 1..3: mod_base = OTHER; note = phosphorothioate linkage
  modified_base 21..23: mod_base = OTHER; note = phosphorothioate linkage
tcgactcattagaagaaaaggtg

SEQ ID NO: 339 - RNA, 23 nt, synthetic construct
  source 1..23: mol_type = other RNA
  modified_base 1: mod_base = OTHER; note = 2'-O-methyl ribonucleotide
  modified_base 2: mod_base = OTHER; note = 2'-fluoro ribonucleotide
  modified_base 3..6: mod_base = OTHER; note = 2'-O-methyl ribonucleotide
  modified_base 7: mod_base = OTHER; note = 2'-fluoro ribonucleotide
  modified_base 8..11: mod_base = OTHER; note = 2'-O-methyl ribonucleotide
  modified_base 12: mod_base = OTHER; note = 2'-fluoro ribonucleotide
  modified_base 13: mod_base = OTHER; note = 2'-O-methyl ribonucleotide
  modified_base 14: mod_base = OTHER; note = 2'-fluoro ribonucleotide
  modified_base 15: mod_base = OTHER; note = 2'-O-methyl ribonucleotide
  modified_base 16: mod_base = OTHER; note = 2'-fluoro ribonucleotide
  modified_base 17..23: mod_base = OTHER; note = 2'-O-methyl ribonucleotide
  modified_base 1..3: mod_base = OTHER; note = phosphorothioate linkage
  modified_base 21..23: mod_base = OTHER; note = phosphorothioate linkage
ttcgactcattagaagaaaaggt

SEQ ID NO: 340 - RNA, 23 nt, synthetic construct
  source 1..23: mol_type = other RNA
  modified_base 1: mod_base = OTHER; note = 2'-O-methyl ribonucleotide
  modified_base 2: mod_base = OTHER; note = 2'-fluoro ribonucleotide
  modified_base 3..6: mod_base = OTHER; note = 2'-O-methyl ribonucleotide
  modified_base 7: mod_base = OTHER; note = 2'-fluoro ribonucleotide
  modified_base 8..11: mod_base = OTHER; note = 2'-O-methyl ribonucleotide
  modified_base 12: mod_base = OTHER; note = 2'-fluoro ribonucleotide
  modified_base 13: mod_base = OTHER; note = 2'-O-methyl ribonucleotide
  modified_base 14: mod_base = OTHER; note = 2'-fluoro ribonucleotide
  modified_base 15: mod_base = OTHER; note = 2'-O-methyl ribonucleotide
  modified_base 16: mod_base = OTHER; note = 2'-fluoro ribonucleotide
  modified_base 17..23: mod_base = OTHER; note = 2'-O-methyl ribonucleotide
  modified_base 1..3: mod_base = OTHER; note = phosphorothioate linkage
  modified_base 21..23: mod_base = OTHER; note = phosphorothioate linkage
tgtcgactcattagaagaaaagg

SEQ ID NO: 341 - RNA, 23 nt, synthetic construct
  source 1..23: mol_type = other RNA
  modified_base 1: mod_base = OTHER; note = 2'-O-methyl ribonucleotide
  modified_base 2: mod_base = OTHER; note = 2'-fluoro ribonucleotide
  modified_base 3..6: mod_base = OTHER; note = 2'-O-methyl ribonucleotide
  modified_base 7: mod_base = OTHER; note = 2'-fluoro ribonucleotide
  modified_base 8..11: mod_base = OTHER; note = 2'-O-methyl ribonucleotide
  modified_base 12: mod_base = OTHER; note = 2'-fluoro ribonucleotide
  modified_base 13: mod_base = OTHER; note = 2'-O-methyl ribonucleotide
  modified_base 14: mod_base = OTHER; note = 2'-fluoro ribonucleotide
  modified_base 15: mod_base = OTHER; note = 2'-O-methyl ribonucleotide
  modified_base 16: mod_base = OTHER; note = 2'-fluoro ribonucleotide
  modified_base 17..23: mod_base = OTHER; note = 2'-O-methyl ribonucleotide
  modified_base 1..3: mod_base = OTHER; note = phosphorothioate linkage
  modified_base 21..23: mod_base = OTHER; note = phosphorothioate linkage
tagtcgactcattagaagaaaag

SEQ ID NO: 342 - RNA, 23 nt, synthetic construct
  source 1..23: mol_type = other RNA
  modified_base 1: mod_base = OTHER; note = 2'-O-methyl ribonucleotide
  modified_base 2: mod_base = OTHER; note = 2'-fluoro ribonucleotide
  modified_base 3..6: mod_base = OTHER; note = 2'-O-methyl ribonucleotide
  modified_base 7: mod_base = OTHER; note = 2'-fluoro ribonucleotide
  modified_base 8..11: mod_base = OTHER; note = 2'-O-methyl ribonucleotide
  modified_base 12: mod_base = OTHER; note = 2'-fluoro ribonucleotide
  modified_base 13: mod_base = OTHER; note = 2'-O-methyl ribonucleotide
  modified_base 14: mod_base = OTHER; note = 2'-fluoro ribonucleotide
  modified_base 15: mod_base = OTHER; note = 2'-O-methyl ribonucleotide
  modified_base 16: mod_base = OTHER; note = 2'-fluoro ribonucleotide
  modified_base 17..23: mod_base = OTHER; note = 2'-O-methyl ribonucleotide
  modified_base 1..3: mod_base = OTHER; note = phosphorothioate linkage
  modified_base 21..23: mod_base = OTHER; note = phosphorothioate linkage
taagtcgactcattagaagaaaa

SEQ ID NO: 343 - RNA, 23 nt, synthetic construct
  source 1..23: mol_type = other RNA
  modified_base 1: mod_base = OTHER; note = 2'-O-methyl ribonucleotide
  modified_base 2: mod_base = OTHER; note = 2'-fluoro ribonucleotide
  modified_base 3..6: mod_base = OTHER; note = 2'-O-methyl ribonucleotide
  modified_base 7: mod_base = OTHER; note = 2'-fluoro ribonucleotide
  modified_base 8..11: mod_base = OTHER; note = 2'-O-methyl ribonucleotide
  modified_base 12: mod_base = OTHER; note = 2'-fluoro ribonucleotide
  modified_base 13: mod_base = OTHER; note = 2'-O-methyl ribonucleotide
  modified_base 14: mod_base = OTHER; note = 2'-fluoro ribonucleotide
  modified_base 15: mod_base = OTHER; note = 2'-O-methyl ribonucleotide
  modified_base 16: mod_base = OTHER; note = 2'-fluoro ribonucleotide
  modified_base 17..23: mod_base = OTHER; note = 2'-O-methyl ribonucleotide
  modified_base 1..3: mod_base = OTHER; note = phosphorothioate linkage
  modified_base 21..23: mod_base = OTHER; note = phosphorothioate linkage
ttcaaagtcgactcattagaaga

SEQ ID NO: 344 - RNA, 23 nt, synthetic construct
  source 1..23: mol_type = other RNA
  modified_base 1: mod_base = OTHER; note = 2'-O-methyl ribonucleotide
  modified_base 2: mod_base = OTHER; note = 2'-fluoro ribonucleotide
  modified_base 3..6: mod_base = OTHER; note = 2'-O-methyl ribonucleotide
  modified_base 7: mod_base = OTHER; note = 2'-fluoro ribonucleotide
  modified_base 8..11: mod_base = OTHER; note = 2'-O-methyl ribonucleotide
  modified_base 12: mod_base = OTHER; note = 2'-fluoro ribonucleotide
  modified_base 13: mod_base = OTHER; note = 2'-O-methyl ribonucleotide
  modified_base 14: mod_base = OTHER; note = 2'-fluoro ribonucleotide
  modified_base 15: mod_base = OTHER; note = 2'-O-methyl ribonucleotide
  modified_base 16: mod_base = OTHER; note = 2'-fluoro ribonucleotide
  modified_base 17..23: mod_base = OTHER; note = 2'-O-methyl ribonucleotide
  modified_base 1..3: mod_base = OTHER; note = phosphorothioate linkage
  modified_base 21..23: mod_base = OTHER; note = phosphorothioate linkage
tacggctgctttccagctcaaag

SEQ ID NO: 345 - RNA, 23 nt, synthetic construct
  source 1..23: mol_type = other RNA
  modified_base 1: mod_base = OTHER; note = 2'-O-methyl ribonucleotide
  modified_base 2: mod_base = OTHER; note = 2'-fluoro ribonucleotide
  modified_base 3..6: mod_base = OTHER; note = 2'-O-methyl ribonucleotide
  modified_base 7: mod_base = OTHER; note = 2'-fluoro ribonucleotide
  modified_base 8..11: mod_base = OTHER; note = 2'-O-methyl ribonucleotide
  modified_base 12: mod_base = OTHER; note = 2'-fluoro ribonucleotide
  modified_base 13: mod_base = OTHER; note = 2'-O-methyl ribonucleotide
  modified_base 14: mod_base = OTHER; note = 2'-fluoro ribonucleotide
  modified_base 15: mod_base = OTHER; note = 2'-O-methyl ribonucleotide
  modified_base 16: mod_base = OTHER; note = 2'-fluoro ribonucleotide
  modified_base 17..23: mod_base = OTHER; note = 2'-O-methyl ribonucleotide
  modified_base 1..3: mod_base = OTHER; note = phosphorothioate linkage
  modified_base 21..23: mod_base = OTHER; note = phosphorothioate linkage
tagaccaaggagaaacggctgct

SEQ ID NO: 346 - RNA, 23 nt, synthetic construct
  source 1..23: mol_type = other RNA
  modified_base 1: mod_base = OTHER; note = 2'-O-methyl ribonucleotide
  modified_base 2: mod_base = OTHER; note = 2'-fluoro ribonucleotide
  modified_base 3..6: mod_base = OTHER; note = 2'-O-methyl ribonucleotide
  modified_base 7: mod_base = OTHER; note = 2'-fluoro ribonucleotide
  modified_base 8..11: mod_base = OTHER; note = 2'-O-methyl ribonucleotide
  modified_base 12: mod_base = OTHER; note = 2'-fluoro ribonucleotide
  modified_base 13: mod_base = OTHER; note = 2'-O-methyl ribonucleotide
  modified_base 14: mod_base = OTHER; note = 2'-fluoro ribonucleotide
  modified_base 15: mod_base = OTHER; note = 2'-O-methyl ribonucleotide
  modified_base 16: mod_base = OTHER; note = 2'-fluoro ribonucleotide
  modified_base 17..23: mod_base = OTHER; note = 2'-O-methyl ribonucleotide
  modified_base 1..3: mod_base = OTHER; note = phosphorothioate linkage
  modified_base 21..23: mod_base = OTHER; note = phosphorothioate linkage
tcttagaccaaggagaaacggct

SEQ ID NO: 347 - RNA, 23 nt, synthetic construct
  source 1..23: mol_type = other RNA
  modified_base 1: mod_base = OTHER; note = 2'-O-methyl ribonucleotide
  modified_base 2: mod_base = OTHER; note = 2'-fluoro ribonucleotide
  modified_base 3..6: mod_base = OTHER; note = 2'-O-methyl ribonucleotide
  modified_base 7: mod_base = OTHER; note = 2'-fluoro ribonucleotide
  modified_base 8..11: mod_base = OTHER; note = 2'-O-methyl ribonucleotide
  modified_base 12: mod_base = OTHER; note = 2'-fluoro ribonucleotide
  modified_base 13: mod_base = OTHER; note = 2'-O-methyl ribonucleotide
  modified_base 14: mod_base = OTHER; note = 2'-fluoro ribonucleotide
  modified_base 15: mod_base = OTHER; note = 2'-O-methyl ribonucleotide
  modified_base 16: mod_base = OTHER; note = 2'-fluoro ribonucleotide
  modified_base 17..23: mod_base = OTHER; note = 2'-O-methyl ribonucleotide
  modified_base 1..3: mod_base = OTHER; note = phosphorothioate linkage
  modified_base 21..23: mod_base = OTHER; note = phosphorothioate linkage
tacttagaccaaggagaaacggc

SEQ ID NO: 348 - RNA, 23 nt, synthetic construct
  source 1..23: mol_type = other RNA
  modified_base 1: mod_base = OTHER; note = 2'-O-methyl ribonucleotide
  modified_base 2: mod_base = OTHER; note = 2'-fluoro ribonucleotide
  modified_base 3..6: mod_base = OTHER; note = 2'-O-methyl ribonucleotide
  modified_base 7: mod_base = OTHER; note = 2'-fluoro ribonucleotide
  modified_base 8..11: mod_base = OTHER; note = 2'-O-methyl ribonucleotide
  modified_base 12: mod_base = OTHER; note = 2'-fluoro ribonucleotide
  modified_base 13: mod_base = OTHER; note = 2'-O-methyl ribonucleotide
  modified_base 14: mod_base = OTHER; note = 2'-fluoro ribonucleotide
  modified_base 15: mod_base = OTHER; note = 2'-O-methyl ribonucleotide
  modified_base 16: mod_base = OTHER; note = 2'-fluoro ribonucleotide
  modified_base 17..23: mod_base = OTHER; note = 2'-O-methyl ribonucleotide
  modified_base 1..3: mod_base = OTHER; note = phosphorothioate linkage
  modified_base 21..23: mod_base = OTHER; note = phosphorothioate linkage
tcgctaaacactggttcttgcct

SEQ ID NO: 349 - RNA, 23 nt, synthetic construct
  source 1..23: mol_type = other RNA
  modified_base 1: mod_base = OTHER; note = 2'-O-methyl ribonucleotide
  modified_base 2: mod_base = OTHER; note = 2'-fluoro ribonucleotide
  modified_base 3..6: mod_base = OTHER; note = 2'-O-methyl ribonucleotide
  modified_base 7: mod_base = OTHER; note = 2'-fluoro ribonucleotide
  modified_base 8..11: mod_base = OTHER; note = 2'-O-methyl ribonucleotide
  modified_base 12: mod_base = OTHER; note = 2'-fluoro ribonucleotide
  modified_base 13: mod_base = OTHER; note = 2'-O-methyl ribonucleotide
  modified_base 14: mod_base = OTHER; note = 2'-fluoro ribonucleotide
  modified_base 15: mod_base = OTHER; note = 2'-O-methyl ribonucleotide
  modified_base 16: mod_base = OTHER; note = 2'-fluoro ribonucleotide
  modified_base 17..23: mod_base = OTHER; note = 2'-O-methyl ribonucleotide
  modified_base 1..3: mod_base = OTHER; note = phosphorothioate linkage
  modified_base 21..23: mod_base = OTHER; note = phosphorothioate linkage
tgcgctaaacactggttcttgcc

SEQ ID NO: 350 - RNA, 23 nt, synthetic construct
  source 1..23: mol_type = other RNA
  modified_base 1: mod_base = OTHER; note = 2'-O-methyl ribonucleotide
  modified_base 2: mod_base = OTHER; note = 2'-fluoro ribonucleotide
  modified_base 3..6: mod_base = OTHER; note = 2'-O-methyl ribonucleotide
  modified_base 7: mod_base = OTHER; note = 2'-fluoro ribonucleotide
  modified_base 8..11: mod_base = OTHER; note = 2'-O-methyl ribonucleotide
  modified_base 12: mod_base = OTHER; note = 2'-fluoro ribonucleotide
  modified_base 13: mod_base = OTHER; note = 2'-O-methyl ribonucleotide
  modified_base 14: mod_base = OTHER; note = 2'-fluoro ribonucleotide
  modified_base 15: mod_base = OTHER; note = 2'-O-methyl ribonucleotide
  modified_base 16: mod_base = OTHER; note = 2'-fluoro ribonucleotide
  modified_base 17..23: mod_base = OTHER; note = 2'-O-methyl ribonucleotide
  modified_base 1..3: mod_base = OTHER; note = phosphorothioate linkage
  modified_base 21..23: mod_base = OTHER; note = phosphorothioate linkage
tcgcgctaaacactggttcttgc

SEQ ID NO: 351 - RNA, 23 nt, synthetic construct
  source 1..23: mol_type = other RNA
  modified_base 1: mod_base = OTHER; note = 2'-O-methyl ribonucleotide
  modified_base 2: mod_base = OTHER; note = 2'-fluoro ribonucleotide
  modified_base 3..6: mod_base = OTHER; note = 2'-O-methyl ribonucleotide
  modified_base 7: mod_base = OTHER; note = 2'-fluoro ribonucleotide
  modified_base 8..11: mod_base = OTHER; note = 2'-O-methyl ribonucleotide
  modified_base 12: mod_base = OTHER; note = 2'-fluoro ribonucleotide
  modified_base 13: mod_base = OTHER; note = 2'-O-methyl ribonucleotide
  modified_base 14: mod_base = OTHER; note = 2'-fluoro ribonucleotide
  modified_base 15: mod_base = OTHER; note = 2'-O-methyl ribonucleotide
  modified_base 16: mod_base = OTHER; note = 2'-fluoro ribonucleotide
  modified_base 17..23: mod_base = OTHER; note = 2'-O-methyl ribonucleotide
  modified_base 1..3: mod_base = OTHER; note = phosphorothioate linkage
  modified_base 21..23: mod_base = OTHER; note = phosphorothioate linkage
ttcccgcgctaaacactggttct

SEQ ID NO: 352 - RNA, 23 nt, synthetic construct
  source 1..23: mol_type = other RNA
  modified_base 1: mod_base = OTHER; note = 2'-O-methyl ribonucleotide
  modified_base 2: mod_base = OTHER; note = 2'-fluoro ribonucleotide
  modified_base 3..6: mod_base = OTHER; note = 2'-O-methyl ribonucleotide
  modified_base 7: mod_base = OTHER; note = 2'-fluoro ribonucleotide
  modified_base 8..11: mod_base = OTHER; note = 2'-O-methyl ribonucleotide
  modified_base 12: mod_base = OTHER; note = 2'-fluoro ribonucleotide
  modified_base 13: mod_base = OTHER; note = 2'-O-methyl ribonucleotide
  modified_base 14: mod_base = OTHER; note = 2'-fluoro ribonucleotide
  modified_base 15: mod_base = OTHER; note = 2'-O-methyl ribonucleotide
  modified_base 16: mod_base = OTHER; note = 2'-fluoro ribonucleotide
  modified_base 17..23: mod_base = OTHER; note = 2'-O-methyl ribonucleotide
  modified_base 1..3: mod_base = OTHER; note = phosphorothioate linkage
  modified_base 21..23: mod_base = OTHER; note = phosphorothioate linkage
tagtcccgcgctaaacactggtt

SEQ ID NO: 353 - RNA, 23 nt, synthetic construct
  source 1..23: mol_type = other RNA
  modified_base 1: mod_base = OTHER; note = 2'-O-methyl ribonucleotide
  modified_base 2: mod_base = OTHER; note = 2'-fluoro ribonucleotide
  modified_base 3..6: mod_base = OTHER; note = 2'-O-methyl ribonucleotide
  modified_base 7: mod_base = OTHER; note = 2'-fluoro ribonucleotide
  modified_base 8..11: mod_base = OTHER; note = 2'-O-methyl ribonucleotide
  modified_base 12: mod_base = OTHER; note = 2'-fluoro ribonucleotide
  modified_base 13: mod_base = OTHER; note = 2'-O-methyl ribonucleotide
  modified_base 14: mod_base = OTHER; note = 2'-fluoro ribonucleotide
  modified_base 15: mod_base = OTHER; note = 2'-O-methyl ribonucleotide
  modified_base 16: mod_base = OTHER; note = 2'-fluoro ribonucleotide
  modified_base 17..23: mod_base = OTHER; note = 2'-O-methyl ribonucleotide
  modified_base 1..3: mod_base = OTHER; note = phosphorothioate linkage
  modified_base 21..23: mod_base = OTHER; note = phosphorothioate linkage
tgtagtcccgcgctaaacactgg

SEQ ID NO: 354 - RNA, 23 nt, synthetic construct
  source 1..23: mol_type = other RNA
  modified_base 1: mod_base = OTHER; note = 2'-O-methyl ribonucleotide
  modified_base 2: mod_base = OTHER; note = 2'-fluoro ribonucleotide
  modified_base 3..6: mod_base = OTHER; note = 2'-O-methyl ribonucleotide
  modified_base 7: mod_base = OTHER; note = 2'-fluoro ribonucleotide
  modified_base 8..11: mod_base = OTHER; note = 2'-O-methyl ribonucleotide
  modified_base 12: mod_base = OTHER; note = 2'-fluoro ribonucleotide
  modified_base 13: mod_base = OTHER; note = 2'-O-methyl ribonucleotide
  modified_base 14: mod_base = OTHER; note = 2'-fluoro ribonucleotide
  modified_base 15: mod_base = OTHER; note = 2'-O-methyl ribonucleotide
  modified_base 16: mod_base = OTHER; note = 2'-fluoro ribonucleotide
  modified_base 17..23: mod_base = OTHER; note = 2'-O-methyl ribonucleotide
  modified_base 1..3: mod_base = OTHER; note = phosphorothioate linkage
  modified_base 21..23: mod_base = OTHER; note = phosphorothioate linkage
tgaacagtagtcccgcgctaaac

SEQ ID NO: 355 - RNA, 23 nt, synthetic construct
  source 1..23: mol_type = other RNA
  modified_base 1: mod_base = OTHER; note = 2'-O-methyl ribonucleotide
  modified_base 2: mod_base = OTHER; note = 2'-fluoro ribonucleotide
  modified_base 3..6: mod_base = OTHER; note = 2'-O-methyl ribonucleotide
  modified_base 7: mod_base = OTHER; note = 2'-fluoro ribonucleotide
  modified_base 8..11: mod_base = OTHER; note = 2'-O-methyl ribonucleotide
  modified_base 12: mod_base = OTHER; note = 2'-fluoro ribonucleotide
  modified_base 13: mod_base = OTHER; note = 2'-O-methyl ribonucleotide
  modified_base 14: mod_base = OTHER; note = 2'-fluoro ribonucleotide
  modified_base 15: mod_base = OTHER; note = 2'-O-methyl ribonucleotide
  modified_base 16: mod_base = OTHER; note = 2'-fluoro ribonucleotide
  modified_base 17..23: mod_base = OTHER; note = 2'-O-methyl ribonucleotide
  modified_base 1..3: mod_base = OTHER; note = phosphorothioate linkage
  modified_base 21..23: mod_base = OTHER; note = phosphorothioate linkage
tggaacagtagtcccgcgctaaa

SEQ ID NO: 356 - RNA, 23 nt, synthetic construct
  source 1..23: mol_type = other RNA
  modified_base 1: mod_base = OTHER; note = 2'-O-methyl ribonucleotide
  modified_base 2: mod_base = OTHER; note = 2'-fluoro ribonucleotide
  modified_base 3..6: mod_base = OTHER; note = 2'-O-methyl ribonucleotide
  modified_base 7: mod_base = OTHER; note = 2'-fluoro ribonucleotide
  modified_base 8..11: mod_base = OTHER; note = 2'-O-methyl ribonucleotide
  modified_base 12: mod_base = OTHER; note = 2'-fluoro ribonucleotide
  modified_base 13: mod_base = OTHER; note = 2'-O-methyl ribonucleotide
  modified_base 14: mod_base = OTHER; note = 2'-fluoro ribonucleotide
  modified_base 15: mod_base = OTHER; note = 2'-O-methyl ribonucleotide
  modified_base 16: mod_base = OTHER; note = 2'-fluoro ribonucleotide
  modified_base 17..23: mod_base = OTHER; note = 2'-O-methyl ribonucleotide
  modified_base 1..3: mod_base = OTHER; note = phosphorothioate linkage
  modified_base 21..23: mod_base = OTHER; note = phosphorothioate linkage
tttggaacagtagtcccgcgcta

SEQ ID NO: 357 - RNA, 23 nt, synthetic construct
  source 1..23: mol_type = other RNA
  modified_base 1: mod_base = OTHER; note = 2'-O-methyl ribonucleotide
  modified_base 2: mod_base = OTHER; note = 2'-fluoro ribonucleotide
  modified_base 3..6: mod_base = OTHER; note = 2'-O-methyl ribonucleotide
  modified_base 7: mod_base = OTHER; note = 2'-fluoro ribonucleotide
  modified_base 8..11: mod_base = OTHER; note = 2'-O-methyl ribonucleotide
  modified_base 12: mod_base = OTHER; note = 2'-fluoro ribonucleotide
  modified_base 13: mod_base = OTHER; note = 2'-O-methyl ribonucleotide
  modified_base 14: mod_base = OTHER; note = 2'-fluoro ribonucleotide
  modified_base 15: mod_base = OTHER; note = 2'-O-methyl ribonucleotide
  modified_base 16: mod_base = OTHER; note = 2'-fluoro ribonucleotide
  modified_base 17..23: mod_base = OTHER; note = 2'-O-methyl ribonucleotide
  modified_base 1..3: mod_base = OTHER; note = phosphorothioate linkage
  modified_base 21..23: mod_base = OTHER; note = phosphorothioate linkage
tgtcggttggaattctttttgga

SEQ ID NO: 358 - RNA, 23 nt, synthetic construct
  source 1..23: mol_type = other RNA
  modified_base 1: mod_base = OTHER; note = 2'-O-methyl ribonucleotide
  modified_base 2: mod_base = OTHER; note = 2'-fluoro ribonucleotide
  modified_base 3..6: mod_base = OTHER; note = 2'-O-methyl ribonucleotide
  modified_base 7: mod_base = OTHER; note = 2'-fluoro ribonucleotide
  modified_base 8..11: mod_base = OTHER; note = 2'-O-methyl ribonucleotide
  modified_base 12: mod_base = OTHER; note = 2'-fluoro ribonucleotide
  modified_base 13: mod_base = OTHER; note = 2'-O-methyl ribonucleotide
  modified_base 14: mod_base = OTHER; note = 2'-fluoro ribonucleotide
  modified_base 15: mod_base = OTHER; note = 2'-O-methyl ribonucleotide
  modified_base 16: mod_base = OTHER; note = 2'-fluoro ribonucleotide
  modified_base 17..23: mod_base = OTHER; note = 2'-O-methyl ribonucleotide
  modified_base 1..3: mod_base = OTHER; note = phosphorothioate linkage
  modified_base 21..23: mod_base = OTHER; note = phosphorothioate linkage
tggtcggttggaattctttttgg

SEQ ID NO: 359 - RNA, 23 nt, synthetic construct
  source 1..23: mol_type = other RNA
  modified_base 1: mod_base = OTHER; note = 2'-O-methyl ribonucleotide
  modified_base 2: mod_base = OTHER; note = 2'-fluoro ribonucleotide
  modified_base 3..6: mod_base = OTHER; note = 2'-O-methyl ribonucleotide
  modified_base 7: mod_base = OTHER; note = 2'-fluoro ribonucleotide
  modified_base 8..11: mod_base = OTHER; note = 2'-O-methyl ribonucleotide
  modified_base 12: mod_base = OTHER; note = 2'-fluoro ribonucleotide
  modified_base 13: mod_base = OTHER; note = 2'-O-methyl ribonucleotide
  modified_base 14: mod_base = OTHER; note = 2'-fluoro ribonucleotide
  modified_base 15: mod_base = OTHER; note = 2'-O-methyl ribonucleotide
  modified_base 16: mod_base = OTHER; note = 2'-fluoro ribonucleotide
  modified_base 17..23: mod_base = OTHER; note = 2'-O-methyl ribonucleotide
  modified_base 1..3: mod_base = OTHER; note = phosphorothioate linkage
  modified_base 21..23: mod_base = OTHER; note = phosphorothioate linkage
tagctggtcggttggaattcttt

SEQ ID NO: 360 - RNA, 23 nt, synthetic construct
  source 1..23: mol_type = other RNA
  modified_base 1: mod_base = OTHER; note = 2'-O-methyl ribonucleotide
  modified_base 2: mod_base = OTHER; note = 2'-fluoro ribonucleotide
  modified_base 3..6: mod_base = OTHER; note = 2'-O-methyl ribonucleotide
  modified_base 7: mod_base = OTHER; note = 2'-fluoro ribonucleotide
  modified_base 8..11: mod_base = OTHER; note = 2'-O-methyl ribonucleotide
  modified_base 12: mod_base = OTHER; note = 2'-fluoro ribonucleotide
  modified_base 13: mod_base = OTHER; note = 2'-O-methyl ribonucleotide
  modified_base 14: mod_base = OTHER; note = 2'-fluoro ribonucleotide
  modified_base 15: mod_base = OTHER; note = 2'-O-methyl ribonucleotide
  modified_base 16: mod_base = OTHER; note = 2'-fluoro ribonucleotide
  modified_base 17..23: mod_base = OTHER; note = 2'-O-methyl ribonucleotide
  modified_base 1..3: mod_base = OTHER; note = phosphorothioate linkage
  modified_base 21..23: mod_base = OTHER; note = phosphorothioate linkage
taagctggtcggttggaattctt

SEQ ID NO: 361 - RNA, 23 nt, synthetic construct
  source 1..23: mol_type = other RNA
  modified_base 1: mod_base = OTHER; note = 2'-O-methyl ribonucleotide
  modified_base 2: mod_base = OTHER; note = 2'-fluoro ribonucleotide
  modified_base 3..6: mod_base = OTHER; note = 2'-O-methyl ribonucleotide
  modified_base 7: mod_base = OTHER; note = 2'-fluoro ribonucleotide
  modified_base 8..11: mod_base = OTHER; note = 2'-O-methyl ribonucleotide
  modified_base 12: mod_base = OTHER; note = 2'-fluoro ribonucleotide
  modified_base 13: mod_base = OTHER; note = 2'-O-methyl ribonucleotide
  modified_base 14: mod_base = OTHER; note = 2'-fluoro ribonucleotide
  modified_base 15: mod_base = OTHER; note = 2'-O-methyl ribonucleotide
  modified_base 16: mod_base = OTHER; note = 2'-fluoro ribonucleotide
  modified_base 17..23: mod_base = OTHER; note = 2'-O-methyl ribonucleotide
  modified_base 1..3: mod_base = OTHER; note = phosphorothioate linkage
  modified_base 21..23: mod_base = OTHER; note = phosphorothioate linkage
tcaagctggtcggttggaattct

SEQ ID NO: 362 - RNA, 23 nt, synthetic construct
  source 1..23: mol_type = other RNA
  modified_base 1: mod_base = OTHER; note = 2'-O-methyl ribonucleotide
  modified_base 2: mod_base = OTHER; note = 2'-fluoro ribonucleotide
  modified_base 3..6: mod_base = OTHER; note = 2'-O-methyl ribonucleotide
  modified_base 7: mod_base = OTHER; note = 2'-fluoro ribonucleotide
  modified_base 8..11: mod_base = OTHER; note = 2'-O-methyl ribonucleotide
  modified_base 12: mod_base = OTHER; note = 2'-fluoro ribonucleotide
  modified_base 13: mod_base = OTHER; note = 2'-O-methyl ribonucleotide
  modified_base 14: mod_base = OTHER; note = 2'-fluoro ribonucleotide
  modified_base 15: mod_base = OTHER; note = 2'-O-methyl ribonucleotide
  modified_base 16: mod_base = OTHER; note = 2'-fluoro ribonucleotide
  modified_base 17..23: mod_base = OTHER; note = 2'-O-methyl ribonucleotide
  modified_base 1..3: mod_base = OTHER; note = phosphorothioate linkage
  modified_base 21..23: mod_base = OTHER; note = phosphorothioate linkage
tacaagctggtcggttggaattc

SEQ ID NO: 363 - RNA, 23 nt, synthetic construct
  source 1..23: mol_type = other RNA
  modified_base 1: mod_base = OTHER; note = 2'-O-methyl ribonucleotide
  modified_base 2: mod_base = OTHER; note = 2'-fluoro ribonucleotide
  modified_base 3..6: mod_base = OTHER; note = 2'-O-methyl ribonucleotide
  modified_base 7: mod_base = OTHER; note = 2'-fluoro ribonucleotide
  modified_base 8..11: mod_base = OTHER; note = 2'-O-methyl ribonucleotide
  modified_base 12: mod_base = OTHER; note = 2'-fluoro ribonucleotide
  modified_base 13: mod_base = OTHER; note = 2'-O-methyl ribonucleotide
  modified_base 14: mod_base = OTHER; note = 2'-fluoro ribonucleotide
  modified_base 15: mod_base = OTHER; note = 2'-O-methyl ribonucleotide
  modified_base 16: mod_base = OTHER; note = 2'-fluoro ribonucleotide
  modified_base 17..23: mod_base = OTHER; note = 2'-O-methyl ribonucleotide
  modified_base 1..3: mod_base = OTHER; note = phosphorothioate linkage
  modified_base 21..23: mod_base = OTHER; note = phosphorothioate linkage
taacaagctggtcggttggaatt

SEQ ID NO: 364 - RNA, 23 nt, synthetic construct
  source 1..23: mol_type = other RNA
  modified_base 1: mod_base = OTHER; note = 2'-O-methyl ribonucleotide
  modified_base 2: mod_base = OTHER; note = 2'-fluoro ribonucleotide
  modified_base 3..6: mod_base = OTHER; note = 2'-O-methyl ribonucleotide
  modified_base 7: mod_base = OTHER; note = 2'-fluoro ribonucleotide
  modified_base 8..11: mod_base = OTHER; note = 2'-O-methyl ribonucleotide
  modified_base 12: mod_base = OTHER; note = 2'-fluoro ribonucleotide
  modified_base 13: mod_base = OTHER; note = 2'-O-methyl ribonucleotide
  modified_base 14: mod_base = OTHER; note = 2'-fluoro ribonucleotide
  modified_base 15: mod_base = OTHER; note = 2'-O-methyl ribonucleotide
  modified_base 16: mod_base = OTHER; note = 2'-fluoro ribonucleotide
  modified_base 17..23: mod_base = OTHER; note = 2'-O-methyl ribonucleotide
  modified_base 1..3: mod_base = OTHER; note = phosphorothioate linkage
  modified_base 21..23: mod_base = OTHER; note = phosphorothioate linkage
taaacaagctggtcggttggaat

SEQ ID NO: 365 - RNA, 23 nt, synthetic construct
  source 1..23: mol_type = other RNA
  modified_base 1: mod_base = OTHER; note = 2'-O-methyl ribonucleotide
  modified_base 2: mod_base = OTHER; note = 2'-fluoro ribonucleotide
  modified_base 3..6: mod_base = OTHER; note = 2'-O-methyl ribonucleotide
  modified_base 7: mod_base = OTHER; note = 2'-fluoro ribonucleotide
  modified_base 8..11: mod_base = OTHER; note = 2'-O-methyl ribonucleotide
  modified_base 12: mod_base = OTHER; note = 2'-fluoro ribonucleotide
  modified_base 13: mod_base = OTHER; note = 2'-O-methyl ribonucleotide
  modified_base 14: mod_base = OTHER; note = 2'-fluoro ribonucleotide
  modified_base 15: mod_base = OTHER; note = 2'-O-methyl ribonucleotide
  modified_base 16: mod_base = OTHER; note = 2'-fluoro ribonucleotide
  modified_base 17..23: mod_base = OTHER; note = 2'-O-methyl ribonucleotide
  modified_base 1..3: mod_base = OTHER; note = phosphorothioate linkage
  modified_base 21..23: mod_base = OTHER; note = phosphorothioate linkage
ttaaatacaaaccgaaggcaatg

SEQ ID NO: 366 - RNA, 23 nt, synthetic construct
  source 1..23: mol_type = other RNA
  modified_base 1: mod_base = OTHER; note = 2'-O-methyl ribonucleotide
  modified_base 2: mod_base = OTHER; note = 2'-fluoro ribonucleotide
  modified_base 3..6: mod_base = OTHER; note = 2'-O-methyl ribonucleotide
  modified_base 7: mod_base = OTHER; note = 2'-fluoro ribonucleotide
  modified_base 8..11: mod_base = OTHER; note = 2'-O-methyl ribonucleotide
  modified_base 12: mod_base = OTHER; note = 2'-fluoro ribonucleotide
  modified_base 13: mod_base = OTHER; note = 2'-O-methyl ribonucleotide
  modified_base 14: mod_base = OTHER; note = 2'-fluoro ribonucleotide
  modified_base 15: mod_base = OTHER; note = 2'-O-methyl ribonucleotide
  modified_base 16: mod_base = OTHER; note = 2'-fluoro ribonucleotide
  modified_base 17..23: mod_base = OTHER; note = 2'-O-methyl ribonucleotide
  modified_base 1..3: mod_base = OTHER; note = phosphorothioate linkage
  modified_base 21..23: mod_base = OTHER; note = phosphorothioate linkage
tagacactaaatacaaaccgaag

SEQ ID NO: 367 - RNA, 23 nt, synthetic construct
  source 1..23: mol_type = other RNA
  modified_base 1: mod_base = OTHER; note = 2'-O-methyl ribonucleotide
  modified_base 2: mod_base = OTHER; note = 2'-fluoro ribonucleotide
  modified_base 3..6: mod_base = OTHER; note = 2'-O-methyl ribonucleotide
  modified_base 7: mod_base = OTHER; note = 2'-fluoro ribonucleotide
  modified_base 8..11: mod_base = OTHER; note = 2'-O-methyl ribonucleotide
  modified_base 12: mod_base = OTHER; note = 2'-fluoro ribonucleotide
  modified_base 13: mod_base = OTHER; note = 2'-O-methyl ribonucleotide
  modified_base 14: mod_base = OTHER; note = 2'-fluoro ribonucleotide
  modified_base 15: mod_base = OTHER; note = 2'-O-methyl ribonucleotide
  modified_base 16: mod_base = OTHER; note = 2'-fluoro ribonucleotide
  modified_base 17..23: mod_base = OTHER; note = 2'-O-methyl ribonucleotide
  modified_base 1..3: mod_base = OTHER; note = phosphorothioate linkage
  modified_base 21..23: mod_base = OTHER; note = phosphorothioate linkage
tcggaggtcatgttcttacattc

SEQ ID NO: 368 - RNA, 23 nt, synthetic construct
  source 1..23: mol_type = other RNA
  modified_base 1: mod_base = OTHER; note = 2'-O-methyl ribonucleotide
  modified_base 2: mod_base = OTHER; note = 2'-fluoro ribonucleotide
  modified_base 3..6: mod_base = OTHER; note = 2'-O-methyl ribonucleotide
  modified_base 7: mod_base = OTHER; note = 2'-fluoro ribonucleotide
  modified_base 8..11: mod_base = OTHER; note = 2'-O-methyl ribonucleotide
  modified_base 12: mod_base = OTHER; note = 2'-fluoro ribonucleotide
  modified_base 13: mod_base = OTHER; note = 2'-O-methyl ribonucleotide
  modified_base 14: mod_base = OTHER; note = 2'-fluoro ribonucleotide
  modified_base 15: mod_base = OTHER; note = 2'-O-methyl ribonucleotide
  modified_base 16: mod_base = OTHER; note = 2'-fluoro ribonucleotide
  modified_base 17..23: mod_base = OTHER; note = 2'-O-methyl ribonucleotide
  modified_base 1..3: mod_base = OTHER; note = phosphorothioate linkage
  modified_base 21..23: mod_base = OTHER; note = phosphorothioate linkage
tactacacggaggtcatgttctt

SEQ ID NO: 369 - RNA, 23 nt, synthetic construct
  source 1..23: mol_type = other RNA
  modified_base 1: mod_base = OTHER; note = 2'-O-methyl ribonucleotide
  modified_base 2: mod_base = OTHER; note = 2'-fluoro ribonucleotide
  modified_base 3..6: mod_base = OTHER; note = 2'-O-methyl ribonucleotide
  modified_base 7: mod_base = OTHER; note = 2'-fluoro ribonucleotide
  modified_base 8..11: mod_base = OTHER; note = 2'-O-methyl ribonucleotide
  modified_base 12: mod_base = OTHER; note = 2'-fluoro ribonucleotide
  modified_base 13: mod_base = OTHER; note = 2'-O-methyl ribonucleotide
  modified_base 14: mod_base = OTHER; note = 2'-fluoro ribonucleotide
  modified_base 15: mod_base = OTHER; note = 2'-O-methyl ribonucleotide
  modified_base 16: mod_base = OTHER; note = 2'-fluoro ribonucleotide
  modified_base 17..23: mod_base = OTHER; note = 2'-O-methyl ribonucleotide
  modified_base 1..3: mod_base = OTHER; note = phosphorothioate linkage
  modified_base 21..23: mod_base = OTHER; note = phosphorothioate linkage
ttacagacactacacggaggtca

SEQ ID NO: 370 - RNA, 23 nt, synthetic construct
  source 1..23: mol_type = other RNA
  modified_base 1: mod_base = OTHER; note = 2'-O-methyl ribonucleotide
  modified_base 2: mod_base = OTHER; note = 2'-fluoro ribonucleotide
  modified_base 3..6: mod_base = OTHER; note = 2'-O-methyl ribonucleotide
  modified_base 7: mod_base = OTHER; note = 2'-fluoro ribonucleotide
  modified_base 8..11: mod_base = OTHER; note = 2'-O-methyl ribonucleotide
  modified_base 12: mod_base = OTHER; note = 2'-fluoro ribonucleotide
  modified_base 13: mod_base = OTHER; note = 2'-O-methyl ribonucleotide
  modified_base 14: mod_base = OTHER; note = 2'-fluoro ribonucleotide
  modified_base 15: mod_base = OTHER; note = 2'-O-methyl ribonucleotide
  modified_base 16: mod_base = OTHER; note = 2'-fluoro ribonucleotide
  modified_base 17..23: mod_base = OTHER; note = 2'-O-methyl ribonucleotide
  modified_base 1..3: mod_base = OTHER; note = phosphorothioate linkage
  modified_base 21..23: mod_base = OTHER; note = phosphorothioate linkage
ttaaggtattacagacactacac

SEQ ID NO: 371 - RNA, 23 nt, synthetic construct
  source 1..23: mol_type = other RNA
  modified_base 1: mod_base = OTHER; note = 2'-O-methyl ribonucleotide
  modified_base 2: mod_base = OTHER; note = 2'-fluoro ribonucleotide
  modified_base 3..6: mod_base = OTHER; note = 2'-O-methyl ribonucleotide
  modified_base 7: mod_base = OTHER; note = 2'-fluoro ribonucleotide
  modified_base 8..11: mod_base = OTHER; note = 2'-O-methyl ribonucleotide
  modified_base 12: mod_base = OTHER; note = 2'-fluoro ribonucleotide
  modified_base 13: mod_base = OTHER; note = 2'-O-methyl ribonucleotide
  modified_base 14: mod_base = OTHER; note = 2'-fluoro ribonucleotide
  modified_base 15: mod_base = OTHER; note = 2'-O-methyl ribonucleotide
  modified_base 16: mod_base = OTHER; note = 2'-fluoro ribonucleotide
  modified_base 17..23: mod_base = OTHER; note = 2'-O-methyl ribonucleotide
  modified_base 1..3: mod_base = OTHER; note = phosphorothioate linkage
  modified_base 21..23: mod_base = OTHER; note = phosphorothioate linkage
ttctttcacgtattgttcaaaaa

SEQ ID NO: 372 - RNA, 23 nt, synthetic construct
  source 1..23: mol_type = other RNA
  modified_base 1: mod_base = OTHER; note = 2'-O-methyl ribonucleotide
  modified_base 2: mod_base = OTHER; note = 2'-fluoro ribonucleotide
  modified_base 3..6: mod_base = OTHER; note = 2'-O-methyl ribonucleotide
  modified_base 7: mod_base = OTHER; note = 2'-fluoro ribonucleotide
  modified_base 8..11: mod_base = OTHER; note = 2'-O-methyl ribonucleotide
  modified_base 12: mod_base = OTHER; note = 2'-fluoro ribonucleotide
  modified_base 13: mod_base = OTHER; note = 2'-O-methyl ribonucleotide
  modified_base 14: mod_base = OTHER; note = 2'-fluoro ribonucleotide
  modified_base 15: mod_base = OTHER; note = 2'-O-methyl ribonucleotide
  modified_base 16: mod_base = OTHER; note = 2'-fluoro ribonucleotide
  modified_base 17..23: mod_base = OTHER; note = 2'-O-methyl ribonucleotide
  modified_base 1..3: mod_base = OTHER; note = phosphorothioate linkage
  modified_base 21..23: mod_base = OTHER; note = phosphorothioate linkage
tatctttcacgtattgttcaaaa

SEQ ID NO: 373 - RNA, 23 nt, synthetic construct
  source 1..23: mol_type = other RNA
  modified_base 1: mod_base = OTHER; note = 2'-O-methyl ribonucleotide
  modified_base 2: mod_base = OTHER; note = 2'-fluoro ribonucleotide
  modified_base 3..6: mod_base = OTHER; note = 2'-O-methyl ribonucleotide
  modified_base 7: mod_base = OTHER; note = 2'-fluoro ribonucleotide
  modified_base 8..11: mod_base = OTHER; note = 2'-O-methyl ribonucleotide
  modified_base 12: mod_base = OTHER; note = 2'-fluoro ribonucleotide
  modified_base 13: mod_base = OTHER; note = 2'-O-methyl ribonucleotide
  modified_base 14: mod_base = OTHER; note = 2'-fluoro ribonucleotide
  modified_base 15: mod_base = OTHER; note = 2'-O-methyl ribonucleotide
  modified_base 16: mod_base = OTHER; note = 2'-fluoro ribonucleotide
  modified_base 17..23: mod_base = OTHER; note = 2'-O-methyl ribonucleotide
  modified_base 1..3: mod_base = OTHER; note = phosphorothioate linkage
  modified_base 21..23: mod_base = OTHER; note = phosphorothioate linkage
tcatctttcacgtattgttcaaa

SEQ ID NO: 374 - RNA, 23 nt, synthetic construct
  source 1..23: mol_type = other RNA
  modified_base 1: mod_base = OTHER; note = 2'-O-methyl ribonucleotide
  modified_base 2: mod_base = OTHER; note = 2'-fluoro ribonucleotide
  modified_base 3..6: mod_base = OTHER; note = 2'-O-methyl ribonucleotide
  modified_base 7: mod_base = OTHER; note = 2'-fluoro ribonucleotide
  modified_base 8..11: mod_base = OTHER; note = 2'-O-methyl ribonucleotide
  modified_base 12: mod_base = OTHER; note = 2'-fluoro ribonucleotide
  modified_base 13: mod_base = OTHER; note = 2'-O-methyl ribonucleotide
  modified_base 14: mod_base = OTHER; note = 2'-fluoro ribonucleotide
  modified_base 15: mod_base = OTHER; note = 2'-O-methyl ribonucleotide
  modified_base 16: mod_base = OTHER; note = 2'-fluoro ribonucleotide
  modified_base 17..23: mod_base = OTHER; note = 2'-O-methyl ribonucleotide
  modified_base 1..3: mod_base = OTHER; note = phosphorothioate linkage
  modified_base 21..23: mod_base = OTHER; note = phosphorothioate linkage
tgcatctttcacgtattgttcaa

SEQ ID NO: 375 - RNA, 23 nt, synthetic construct
  source 1..23: mol_type = other RNA
  modified_base 1: mod_base = OTHER; note = 2'-O-methyl ribonucleotide
  modified_base 2: mod_base = OTHER; note = 2'-fluoro ribonucleotide
  modified_base 3..6: mod_base = OTHER; note = 2'-O-methyl ribonucleotide
  modified_base 7: mod_base = OTHER; note = 2'-fluoro ribonucleotide
  modified_base 8..11: mod_base = OTHER; note = 2'-O-methyl ribonucleotide
  modified_base 12: mod_base = OTHER; note = 2'-fluoro ribonucleotide
  modified_base 13: mod_base = OTHER; note = 2'-O-methyl ribonucleotide
  modified_base 14: mod_base = OTHER; note = 2'-fluoro ribonucleotide
  modified_base 15: mod_base = OTHER; note = 2'-O-methyl ribonucleotide
  modified_base 16: mod_base = OTHER; note = 2'-fluoro ribonucleotide
  modified_base 17..23: mod_base = OTHER; note = 2'-O-methyl ribonucleotide
  modified_base 1..3: mod_base = OTHER; note = phosphorothioate linkage
  modified_base 21..23: mod_base = OTHER; note = phosphorothioate linkage
tttgcatctttcacgtattgttc

SEQ ID NO: 376 - RNA, 23 nt, synthetic construct
  source 1..23: mol_type = other RNA
  modified_base 1: mod_base = OTHER; note = 2'-O-methyl ribonucleotide
  modified_base 2: mod_base = OTHER; note = 2'-fluoro ribonucleotide
  modified_base 3..6: mod_base = OTHER; note = 2'-O-methyl ribonucleotide
  modified_base 7: mod_base = OTHER; note = 2'-fluoro ribonucleotide
  modified_base 8..11: mod_base = OTHER; note = 2'-O-methyl ribonucleotide
  modified_base 12: mod_base = OTHER; note = 2'-fluoro ribonucleotide
  modified_base 13: mod_base = OTHER; note = 2'-O-methyl ribonucleotide
  modified_base 14: mod_base = OTHER; note = 2'-fluoro ribonucleotide
  modified_base 15: mod_base = OTHER; note = 2'-O-methyl ribonucleotide
  modified_base 16: mod_base = OTHER; note = 2'-fluoro ribonucleotide
  modified_base 17..23: mod_base = OTHER; note = 2'-O-methyl ribonucleotide
  modified_base 1..3: mod_base = OTHER; note = phosphorothioate linkage
  modified_base 21..23: mod_base = OTHER; note = phosphorothioate linkage
tttcaggtgcttgcatctttcac

SEQ ID NO: 377 - RNA, 23 nt, synthetic construct
  source 1..23: mol_type = other RNA
  modified_base 1: mod_base = OTHER; note = 2'-O-methyl ribonucleotide
  modified_base 2: mod_base = OTHER; note = 2'-fluoro ribonucleotide
  modified_base 3..6: mod_base = OTHER; note = 2'-O-methyl ribonucleotide
  modified_base 7: mod_base = OTHER; note = 2'-fluoro ribonucleotide
  modified_base 8..11: mod_base = OTHER; note = 2'-O-methyl ribonucleotide
  modified_base 12: mod_base = OTHER; note = 2'-fluoro ribonucleotide
  modified_base 13: mod_base = OTHER; note = 2'-O-methyl ribonucleotide
  modified_base 14: mod_base = OTHER; note = 2'-fluoro ribonucleotide
  modified_base 15: mod_base = OTHER; note = 2'-O-methyl ribonucleotide
  modified_base 16: mod_base = OTHER; note = 2'-fluoro ribonucleotide
  modified_base 17..23: mod_base = OTHER; note = 2'-O-methyl ribonucleotide
  modified_base 1..3: mod_base = OTHER; note = phosphorothioate linkage
  modified_base 21..23: mod_base = OTHER; note = phosphorothioate linkage
tcgcattcaaacagaaattcagg

SEQ ID NO: 378 - RNA, 23 nt, synthetic construct
  source 1..23: mol_type = other RNA
  modified_base 1: mod_base = OTHER; note = 2'-O-methyl ribonucleotide
  modified_base 2: mod_base = OTHER; note = 2'-fluoro ribonucleotide
  modified_base 3..6: mod_base = OTHER; note = 2'-O-methyl ribonucleotide
  modified_base 7: mod_base = OTHER; note = 2'-fluoro ribonucleotide
  modified_base 8..11: mod_base = OTHER; note = 2'-O-methyl ribonucleotide
  modified_base 12: mod_base = OTHER; note = 2'-fluoro ribonucleotide
  modified_base 13: mod_base = OTHER; note = 2'-O-methyl ribonucleotide
  modified_base 14: mod_base = OTHER; note = 2'-fluoro ribonucleotide
  modified_base 15: mod_base = OTHER; note = 2'-O-methyl ribonucleotide
  modified_base 16: mod_base = OTHER; note = 2'-fluoro ribonucleotide
  modified_base 17..23: mod_base = OTHER; note = 2'-O-methyl ribonucleotide
  modified_base 1..3: mod_base = OTHER; note = phosphorothioate linkage
  modified_base 21..23: mod_base = OTHER; note = phosphorothioate linkage
tgacgtttattactaacacaagg

SEQ ID NO: 379 - RNA, 23 nt, synthetic construct
  source 1..23: mol_type = other RNA
  modified_base 1: mod_base = OTHER; note = 2'-O-methyl ribonucleotide
  modified_base 2: mod_base = OTHER; note = 2'-fluoro ribonucleotide
  modified_base 3..6: mod_base = OTHER; note = 2'-O-methyl ribonucleotide
  modified_base 7: mod_base = OTHER; note = 2'-fluoro ribonucleotide
  modified_base 8..11: mod_base = OTHER; note = 2'-O-methyl ribonucleotide
  modified_base 12: mod_base = OTHER; note = 2'-fluoro ribonucleotide
  modified_base 13: mod_base = OTHER; note = 2'-O-methyl ribonucleotide
  modified_base 14: mod_base = OTHER; note = 2'-fluoro ribonucleotide
  modified_base 15: mod_base = OTHER; note = 2'-O-methyl ribonucleotide
  modified_base 16: mod_base = OTHER; note = 2'-fluoro ribonucleotide
  modified_base 17..23: mod_base = OTHER; note = 2'-O-methyl ribonucleotide
  modified_base 1..3: mod_base = OTHER; note = phosphorothioate linkage
  modified_base 21..23: mod_base = OTHER; note = phosphorothioate linkage
taagacgtttattactaacacaa

SEQ ID NO: 380 - RNA, 23 nt, synthetic construct
  source 1..23: mol_type = other RNA
  modified_base 1: mod_base = OTHER; note = 2'-O-methyl ribonucleotide
  modified_base 2: mod_base = OTHER; note = 2'-fluoro ribonucleotide
  modified_base 3..6: mod_base = OTHER; note = 2'-O-methyl ribonucleotide
  modified_base 7: mod_base = OTHER; note = 2'-fluoro ribonucleotide
  modified_base 8..11: mod_base = OTHER; note = 2'-O-methyl ribonucleotide
  modified_base 12: mod_base = OTHER; note = 2'-fluoro ribonucleotide
  modified_base 13: mod_base = OTHER; note = 2'-O-methyl ribonucleotide
  modified_base 14: mod_base = OTHER; note = 2'-fluoro ribonucleotide
  modified_base 15: mod_base = OTHER; note = 2'-O-methyl ribonucleotide
  modified_base 16: mod_base = OTHER; note = 2'-fluoro ribonucleotide
  modified_base 17..23: mod_base = OTHER; note = 2'-O-methyl ribonucleotide
  modified_base 1..3: mod_base = OTHER; note = phosphorothioate linkage
  modified_base 21..23: mod_base = OTHER; note = phosphorothioate linkage
tttgtggcaagacgtttattact

SEQ ID NO: 381 - RNA, 23 nt, synthetic construct
  source 1..23: mol_type = other RNA
  modified_base 1: mod_base = OTHER; note = 2'-O-methyl ribonucleotide
  modified_base 2: mod_base = OTHER; note = 2'-fluoro ribonucleotide
  modified_base 3..6: mod_base = OTHER; note = 2'-O-methyl ribonucleotide
  modified_base 7: mod_base = OTHER; note = 2'-fluoro ribonucleotide
  modified_base 8..11: mod_base = OTHER; note = 2'-O-methyl ribonucleotide
  modified_base 12: mod_base = OTHER; note = 2'-fluoro ribonucleotide
  modified_base 13: mod_base = OTHER; note = 2'-O-methyl ribonucleotide
  modified_base 14: mod_base = OTHER; note = 2'-fluoro ribonucleotide
  modified_base 15: mod_base = OTHER; note = 2'-O-methyl ribonucleotide
  modified_base 16: mod_base = OTHER; note = 2'-fluoro ribonucleotide
  modified_base 17..23: mod_base = OTHER; note = 2'-O-methyl ribonucleotide
  modified_base 1..3: mod_base = OTHER; note = phosphorothioate linkage
  modified_base 21..23: mod_base = OTHER; note = phosphorothioate linkage
tattgtggcaagacgtttattac

SEQ ID NO: 382 - RNA, 23 nt, synthetic construct
  source 1..23: mol_type = other RNA
  modified_base 1: mod_base = OTHER; note = 2'-O-methyl ribonucleotide
  modified_base 2: mod_base = OTHER; note = 2'-fluoro ribonucleotide
  modified_base 3..6: mod_base = OTHER; note = 2'-O-methyl ribonucleotide
  modified_base 7: mod_base = OTHER; note = 2'-fluoro ribonucleotide
  modified_base 8..11: mod_base = OTHER; note = 2'-O-methyl ribonucleotide
  modified_base 12: mod_base = OTHER; note = 2'-fluoro ribonucleotide
  modified_base 13: mod_base = OTHER; note = 2'-O-methyl ribonucleotide
  modified_base 14: mod_base = OTHER; note = 2'-fluoro ribonucleotide
  modified_base 15: mod_base = OTHER; note = 2'-O-methyl ribonucleotide
  modified_base 16: mod_base = OTHER; note = 2'-fluoro ribonucleotide
  modified_base 17..23: mod_base = OTHER; note = 2'-O-methyl ribonucleotide
  modified_base 1..3: mod_base = OTHER; note = phosphorothioate linkage
  modified_base 21..23: mod_base = OTHER; note = phosphorothioate linkage
tcttattgtggcaagacgtttat

SEQ ID NO: 383 - RNA, 23 nt, synthetic construct
  source 1..23: mol_type = other RNA
  modified_base 1: mod_base = OTHER; note = 2'-O-methyl ribonucleotide
  modified_base 2: mod_base = OTHER; note = 2'-fluoro ribonucleotide
  modified_base 3..6: mod_base = OTHER; note = 2'-O-methyl ribonucleotide
  modified_base 7: mod_base = OTHER; note = 2'-fluoro ribonucleotide
  modified_base 8..11: mod_base = OTHER; note = 2'-O-methyl ribonucleotide
  modified_base 12: mod_base = OTHER; note = 2'-fluoro ribonucleotide
  modified_base 13: mod_base = OTHER; note = 2'-O-methyl ribonucleotide
  modified_base 14: mod_base = OTHER; note = 2'-fluoro ribonucleotide
  modified_base 15: mod_base = OTHER; note = 2'-O-methyl ribonucleotide
  modified_base 16: mod_base = OTHER; note = 2'-fluoro ribonucleotide
  modified_base 17..23: mod_base = OTHER; note = 2'-O-methyl ribonucleotide
  modified_base 1..3: mod_base = OTHER; note = phosphorothioate linkage
  modified_base 21..23: mod_base = OTHER; note = phosphorothioate linkage
tgcttattgtggcaagacgttta

SEQ ID NO: 384 - RNA, 23 nt, synthetic construct
  source 1..23: mol_type = other RNA
  modified_base 1: mod_base = OTHER; note = 2'-O-methyl ribonucleotide
  modified_base 2: mod_base = OTHER; note = 2'-fluoro ribonucleotide
  modified_base 3..6: mod_base = OTHER; note = 2'-O-methyl ribonucleotide
  modified_base 7: mod_base = OTHER; note = 2'-fluoro ribonucleotide
  modified_base 8..11: mod_base = OTHER; note = 2'-O-methyl ribonucleotide
  modified_base 12: mod_base = OTHER; note = 2'-fluoro ribonucleotide
  modified_base 13: mod_base = OTHER; note = 2'-O-methyl ribonucleotide
  modified_base 14: mod_base = OTHER; note = 2'-fluoro ribonucleotide
  modified_base 15: mod_base = OTHER; note = 2'-O-methyl ribonucleotide
  modified_base 16: mod_base = OTHER; note = 2'-fluoro ribonucleotide
  modified_base 17..23: mod_base = OTHER; note = 2'-O-methyl ribonucleotide
  modified_base 1..3: mod_base = OTHER; note = phosphorothioate linkage
  modified_base 21..23: mod_base = OTHER; note = phosphorothioate linkage
tggcttattgtggcaagacgttt

SEQ ID NO: 385 - RNA, 21 nt, synthetic construct
  source 1..21: mol_type = other RNA
agggtatgcggaagcgagcaa

SEQ ID NO: 386 - RNA, 21 nt, synthetic construct
  source 1..21: mol_type = other RNA
gggtatgcggaagcgagcaca

SEQ ID NO: 387 - RNA, 21 nt, synthetic construct
  source 1..21: mol_type = other RNA
gtatgcggaagcgagcaccca

SEQ ID NO: 388 - RNA, 21 nt, synthetic construct
  source 1..21: mol_type = other RNA
atgcggaagcgagcaccccaa

SEQ ID NO: 389 - RNA, 21 nt, synthetic construct
  source 1..21: mol_type = other RNA
gagatggctcctgccggtgta

SEQ ID NO: 390 - RNA, 21 nt, synthetic construct
  source 1..21: mol_type = other RNA
caggtgaccgggtgtacataa

SEQ ID NO: 391 - RNA, 21 nt, synthetic construct
  source 1..21: mol_type = other RNA
gaccgggtgtacatacaccca

SEQ ID NO: 392 - RNA, 21 nt, synthetic construct
  source 1..21: mol_type = other RNA
ccgggtgtacatacaccccta

SEQ ID NO: 393 - RNA, 21 nt, synthetic construct
  source 1..21: mol_type = other RNA
cgggtgtacatacacccctta

SEQ ID NO: 394 - RNA, 21 nt, synthetic construct
  source 1..21: mol_type = other RNA
gggtgtacatacaccccttca

SEQ ID NO: 395 - RNA, 21 nt, synthetic construct
  source 1..21: mol_type = other RNA
gtacatacaccccttccacca

SEQ ID NO: 396 - RNA, 21 nt, synthetic construct
  source 1..21: mol_type = other RNA
tacatacaccccttccaccta

SEQ ID NO: 397 - RNA, 21 nt, synthetic construct
  source 1..21: mol_type = other RNA
ctcgtcatccacaatgagaga

SEQ ID NO: 398 - RNA, 21 nt, synthetic construct
  source 1..21: mol_type = other RNA
gtcatccacaatgagagtaca

SEQ ID NO: 399 - RNA, 21 nt, synthetic construct
  source 1..21: mol_type = other RNA
tcatccacaatgagagtacca

SEQ ID NO: 400 - RNA, 21 nt, synthetic construct
  source 1..21: mol_type = other RNA
catccacaatgagagtaccta

SEQ ID NO: 401 - RNA, 21 nt, synthetic construct
  source 1..21: mol_type = other RNA
atccacaatgagagtacctga

SEQ ID NO: 402 - RNA, 21 nt, synthetic construct
  source 1..21: mol_type = other RNA
ccacaatgagagtacctgtga

SEQ ID NO: 403 - RNA, 21 nt, synthetic construct
  source 1..21: mol_type = other RNA
tgagagtacctgtgagcagca

SEQ ID NO: 404 - RNA, 21 nt, synthetic construct
  source 1..21: mol_type = other RNA
ctggcaaaggccaatgccgga

SEQ ID NO: 405 - RNA, 21 nt, synthetic construct
  source 1..21: mol_type = other RNA
gcaaaggccaatgccgggaaa

SEQ ID NO: 406 - RNA, 21 nt, synthetic construct
  source 1..21: mol_type = other RNA
attcaggccaagacatcccca

SEQ ID NO: 407 - RNA, 21 nt, synthetic construct
  source 1..21: mol_type = other RNA
ttcaggccaagacatccccta

SEQ ID NO: 408 - RNA, 21 nt, synthetic construct
  source 1..21: mol_type = other RNA
tggatgaaaaggccctacaga

SEQ ID NO: 409 - RNA, 21 nt, synthetic construct
  source 1..21: mol_type = other RNA
cagctggtgctagtcgctgca

SEQ ID NO: 410 - RNA, 21 nt, synthetic construct
  source 1..21: mol_type = other RNA
tagtcgctgcaaaacttgaca

SEQ ID NO: 411 - RNA, 21 nt, synthetic construct
  source 1..21: mol_type = other RNA
cgctgcaaaacttgacaccga

SEQ ID NO: 412 - RNA, 21 nt, synthetic construct
  source 1..21: mol_type = other RNA
gctgcaaaacttgacaccgaa

SEQ ID NO: 413 - RNA, 21 nt, synthetic construct
  source 1..21: mol_type = other RNA
cttgacaccgaagacaagtta

SEQ ID NO: 414 - RNA, 21 nt, synthetic construct
  source 1..21: mol_type = other RNA
ttgacaccgaagacaagttga

SEQ ID NO: 415 - RNA, 21 nt, synthetic construct
  source 1..21: mol_type = other RNA
tgacaccgaagacaagttgaa

SEQ ID NO: 416 - RNA, 21 nt, synthetic construct
  source 1..21: mol_type = other RNA
gacaccgaagacaagttgaga

SEQ ID NO: 417 - RNA, 21 nt, synthetic construct
  source 1..21: mol_type = other RNA
aagacaagttgagggccgcaa

SEQ ID NO: 418 - RNA, 21 nt, synthetic construct
  source 1..21: mol_type = other RNA
agacaagttgagggccgcaaa

SEQ ID NO: 419 - RNA, 21 nt, synthetic construct
  source 1..21: mol_type = other RNA
agggccgcaatggtcgggata

SEQ ID NO: 420 - RNA, 21 nt, synthetic construct
  source 1..21: mol_type = other RNA
gccgcaatggtcgggatgcta

SEQ ID NO: 421 - RNA, 21 nt, synthetic construct
  source 1..21: mol_type = other RNA
aatggtcgggatgctggccaa

SEQ ID NO: 422 - RNA, 21 nt, synthetic construct
  source 1..21: mol_type = other RNA
atggtcgggatgctggccaaa

SEQ ID NO: 423 - RNA, 21 nt, synthetic construct
  source 1..21: mol_type = other RNA
ccaacttcttgggcttccgta

SEQ ID NO: 424 - RNA, 21 nt, synthetic construct
  source 1..21: mol_type = other RNA
caacttcttgggcttccgtaa

SEQ ID NO: 425 - RNA, 21 nt, synthetic construct
  source 1..21: mol_type = other RNA
aacttcttgggcttccgtata

SEQ ID NO: 426 - RNA, 21 nt, synthetic construct
  source 1..21: mol_type = other RNA
cttcttgggcttccgtatata

SEQ ID NO: 427 - RNA, 21 nt, synthetic construct
  source 1..21: mol_type = other RNA
ttcttgggcttccgtatataa

SEQ ID NO: 428 - RNA, 21 nt, synthetic construct
  source 1..21: mol_type = other RNA
tcttgggcttccgtatatata

SEQ ID NO: 429 - RNA, 21 nt, synthetic construct
  source 1..21: mol_type = other RNA
cttgggcttccgtatatatga

SEQ ID NO: 430 - RNA, 21 nt, synthetic construct
  source 1..21: mol_type = other RNA
ttgggcttccgtatatatgga

SEQ ID NO: 431 - RNA, 21 nt, synthetic construct
  source 1..21: mol_type = other RNA
gggcttccgtatatatggcaa

SEQ ID NO: 432 - RNA, 21 nt, synthetic construct
  source 1..21: mol_type = other RNA
ggcttccgtatatatggcata

SEQ ID NO: 433 - RNA, 21 nt, synthetic construct
  source 1..21: mol_type = other RNA
cttccgtatatatggcatgca

SEQ ID NO: 434 - RNA, 21 nt, synthetic construct
  source 1..21: mol_type = other RNA
ttccgtatatatggcatgcaa

SEQ ID NO: 435 - RNA, 21 nt, synthetic construct
  source 1..21: mol_type = other RNA
tccgtatatatggcatgcaca

SEQ ID NO: 436 - RNA, 21 nt, synthetic construct
  source 1..21: mol_type = other RNA
gtatatatggcatgcacagta

SEQ ID NO: 437 - RNA, 21 nt, synthetic construct
  source 1..21: mol_type = other RNA
atatggcatgcacagtgagca

SEQ ID NO: 438 - RNA, 21 nt, synthetic construct
  source 1..21: mol_type = other RNA
atggcatgcacagtgagctaa

SEQ ID NO: 439 - RNA, 21 nt, synthetic construct
  source 1..21: mol_type = other RNA
tggcatgcacagtgagctata

SEQ ID NO: 440 - RNA, 21 nt, synthetic construct
  source 1..21: mol_type = other RNA
cacagtgagctatggggcgta

SEQ ID NO: 441 - RNA, 21 nt, synthetic construct
  source 1..21: mol_type = other RNA
acagtgagctatggggcgtga

SEQ ID NO: 442 - RNA, 21 nt, synthetic construct
  source 1..21: mol_type = other RNA
cagtgagctatggggcgtgga

SEQ ID NO: 443 - RNA, 21 nt, synthetic construct
  source 1..21: mol_type = other RNA
gtgagctatggggcgtggtca

SEQ ID NO: 444 - RNA, 21 nt, synthetic construct
  source 1..21: mol_type = other RNA
tgagctatggggcgtggtcca

SEQ ID NO: 445 - RNA, 21 nt, synthetic construct
  source 1..21: mol_type = other RNA
gagctatggggcgtggtccaa

SEQ ID NO: 446 - RNA, 21 nt, synthetic construct
  source 1..21: mol_type = other RNA
ctatggggcgtggtccatgga

SEQ ID NO: 447 - RNA, 21 nt, synthetic construct
  source 1..21: mol_type = other RNA
cgtggtccatggggccaccga

SEQ ID NO: 448 - RNA, 21 nt, synthetic construct
  source 1..21: mol_type = other RNA
ccccaacggctgtctttggca

SEQ ID NO: 449 - RNA, 21 nt, synthetic construct
  source 1..21: mol_type = other RNA
caacggctgtctttggcacca

SEQ ID NO: 450 - RNA, 21 nt, synthetic construct
  source 1..21: mol_type = other RNA
aacggctgtctttggcaccca

SEQ ID NO: 451 - RNA, 21 nt, synthetic construct
  source 1..21: mol_type = other RNA
accacacagctgacaggctaa

SEQ ID NO: 452 - RNA, 21 nt, synthetic construct
  source 1..21: mol_type = other RNA
ccacacagctgacaggctaca

SEQ ID NO: 453 - RNA, 21 nt, synthetic construct
  source 1..21: mol_type = other RNA
cacacagctgacaggctacaa

SEQ ID NO: 454 - RNA, 21 nt, synthetic construct
  source 1..21: mol_type = other RNA
ctgacaggctacaggcaatca

SEQ ID NO: 455 - RNA, 21 nt, synthetic construct
  source 1..21: mol_type = other RNA
gacaagaactgcacctcccga

SEQ ID NO: 456 - RNA, 21 nt, synthetic construct
  source 1..21: mol_type = other RNA
cacctcccggctggatgcgca

SEQ ID NO: 457 - RNA, 21 nt, synthetic construct
  source 1..21: mol_type = other RNA
tcccggctggatgcgcacaaa

SEQ ID NO: 458 - RNA, 21 nt, synthetic construct
  source 1..21: mol_type = other RNA
cccggctggatgcgcacaaga

SEQ ID NO: 459 - RNA, 21 nt, synthetic construct
  source 1..21: mol_type = other RNA
gctggatgcgcacaaggtcca

SEQ ID NO: 460 - RNA, 21 nt, synthetic construct
  source 1..21: mol_type = other RNA
ctggatgcgcacaaggtccta

SEQ ID NO: 461 - RNA, 21 nt, synthetic construct
  source 1..21: mol_type = other RNA
gcgcacaaggtcctgtctgca

SEQ ID NO: 462 - RNA, 21 nt, synthetic construct
  source 1..21: mol_type = other RNA
cagccgtttgtgcagggccta

SEQ ID NO: 463 - RNA, 21 nt, synthetic construct
  source 1..21: mol_type = other RNA
gcagggcctggctctctataa

SEQ ID NO: 464 - RNA, 21 nt, synthetic construct
  source 1..21: mol_type = other RNA
ctggctctctatacccctgta

SEQ ID NO: 465 - RNA, 21 nt, synthetic construct
  source 1..21: mol_type = other RNA
ggctctctatacccctgtgga

SEQ ID NO: 466 - RNA, 21 nt, synthetic construct
  source 1..21: mol_type = other RNA
ctctctatacccctgtggtca

SEQ ID NO: 467 - RNA, 21 nt, synthetic construct
  source 1..21: mol_type = other RNA
tctctatacccctgtggtcca

SEQ ID NO: 468 - RNA, 21 nt, synthetic construct
  source 1..21: mol_type = other RNA
tctatacccctgtggtcctca

SEQ ID NO: 469 - RNA, 21 nt, synthetic construct
  source 1..21: mol_type = other RNA
ctgtggtcctcccacgctcta

SEQ ID NO: 470 - RNA, 21 nt, synthetic construct
  source 1..21: mol_type = other RNA
ccacgctctctggacttcaca

SEQ ID NO: 471 - RNA, 21 nt, synthetic construct
  source 1..21: mol_type = other RNA
ctctctggacttcacagaaca

SEQ ID NO: 472 - RNA, 21 nt, synthetic construct
  source 1..21: mol_type = other RNA
tgagaagattgacaggttcaa

SEQ ID NO: 473 - RNA, 21 nt, synthetic construct
  source 1..21: mol_type = other RNA
gacaggttcatgcaggctgta

SEQ ID NO: 474 - RNA, 21 nt, synthetic construct
  source 1..21: mol_type = other RNA
gacagcaccctggctttcaaa

SEQ ID NO: 475 - RNA, 21 nt, synthetic construct
  source 1..21: mol_type = other RNA
accctggctttcaacacctaa

SEQ ID NO: 476 - RNA, 21 nt, synthetic construct
  source 1..21: mol_type = other RNA
tggctttcaacacctacgtca

SEQ ID NO: 477 - RNA, 21 nt, synthetic construct
  source 1..21: mol_type = other RNA
ggctttcaacacctacgtcca

SEQ ID NO: 478 - RNA, 21 nt, synthetic construct
  source 1..21: mol_type = other RNA
gctttcaacacctacgtccaa

SEQ ID NO: 479 - RNA, 21 nt, synthetic construct
  source 1..21: mol_type = other RNA
tttcaacacctacgtccacta

SEQ ID NO: 480 - RNA, 21 nt, synthetic construct
  source 1..21: mol_type = other RNA
tcaacacctacgtccacttca

SEQ ID NO: 481 - RNA, 21 nt, synthetic construct
  source 1..21: mol_type = other RNA
caacacctacgtccacttcca

SEQ ID NO: 482 - RNA, 21 nt, synthetic construct
  source 1..21: mol_type = other RNA
aacacctacgtccacttccaa

SEQ ID NO: 483 - RNA, 21 nt, synthetic construct
  source 1..21: mol_type = other RNA
tacgtccacttccaagggaaa

SEQ ID NO: 484 - RNA, 21 nt, synthetic construct
  source 1..21: mol_type = other RNA
ttctgggtggacaacagcaca

SEQ ID NO: 485 - RNA, 21 nt, synthetic construct
  source 1..21: mol_type = other RNA
acaacttctcggtgactcaaa

SEQ ID NO: 486 - RNA, 21 nt, synthetic construct
  source 1..21: mol_type = other RNA
caacttctcggtgactcaaga

SEQ ID NO: 487 - RNA, 21 nt, synthetic construct
  source 1..21: mol_type = other RNA
aacttctcggtgactcaagta

SEQ ID NO: 488 - RNA, 21 nt, synthetic construct
  source 1..21: mol_type = other RNA
acttctcggtgactcaagtga

SEQ ID NO: 489 - RNA, 21 nt, synthetic construct
  source 1..21: mol_type = other RNA
cttctcggtgactcaagtgca

SEQ ID NO: 490 - RNA, 21 nt, synthetic construct
  source 1..21: mol_type = other RNA
tctcggtgactcaagtgccca

SEQ ID NO: 491 - RNA, 21 nt, synthetic construct
  source 1..21: mol_type = other RNA
ctcggtgactcaagtgcccta

SEQ ID NO: 492 - RNA, 21 nt, synthetic construct
  source 1..21: mol_type = other RNA
cggtgactcaagtgcccttca

SEQ ID NO: 493 - RNA, 21 nt, synthetic construct
  source 1..21: mol_type = other RNA
ccttcactgagagcgcctgca

SEQ ID NO: 494 - RNA, 21 nt, synthetic construct
  source 1..21: mol_type = other RNA
tgctgctgatccagcctcaca

SEQ ID NO: 495 - RNA, 21 nt, synthetic construct
  source 1..21: mol_type = other RNA
ccagcaaaactccctcaacta

SEQ ID NO: 496 - RNA, 21 nt, synthetic construct
  source 1..21: mol_type = other RNA
cagcaaaactccctcaactga

SEQ ID NO: 497 - RNA, 21 nt, synthetic construct
  source 1..21: mol_type = other RNA
agcaaaactccctcaactgga

SEQ ID NO: 498 - RNA, 21 nt, synthetic construct
  source 1..21: mol_type = other RNA
accatccacctgaccatgcca

SEQ ID NO: 499 - RNA, 21 nt, synthetic construct
  source 1..21: mol_type = other RNA
acctgaccatgccccaactga

SEQ ID NO: 500 - RNA, 21 nt, synthetic construct
  source 1..21: mol_type = other RNA
cccgccattctgcacaccgaa

SEQ ID NO: 501 - RNA, 21 nt, synthetic construct
  source 1..21: mol_type = other RNA
acaccgagctgaacctgcaaa

SEQ ID NO: 502 - RNA, 21 nt, synthetic construct
  source 1..21: mol_type = other RNA
cgagctgaacctgcaaaaata

SEQ ID NO: 503 - RNA, 21 nt, synthetic construct
  source 1..21: mol_type = other RNA
gctgaacctgcaaaaattgaa

SEQ ID NO: 504 - RNA, 21 nt, synthetic construct
  source 1..21: mol_type = other RNA
aaaattgagcaatgaccgcaa

SEQ ID NO: 505 - RNA, 21 nt, synthetic construct
  source 1..21: mol_type = other RNA
gagcccacagagtctacccaa

SEQ ID NO: 506 - RNA, 21 nt, synthetic construct
  source 1..21: mol_type = other RNA
agcccacagagtctacccaaa

SEQ ID NO: 507 - RNA, 21 nt, synthetic construct
  source 1..21: mol_type = other RNA
cacagagtctacccaacagca

SEQ ID NO: 508 - RNA, 21 nt, synthetic construct
  source 1..21: mol_type = other RNA
gaggtgaccctgaaccgccca

SEQ ID NO: 509 - RNA, 21 nt, synthetic construct
  source 1..21: mol_type = other RNA
ggtgaccctgaaccgcccata

SEQ ID NO: 510 - RNA, 21 nt, synthetic construct
  source 1..21: mol_type = other RNA
gtgaccctgaaccgcccatta

SEQ ID NO: 511 - RNA, 21 nt, synthetic construct
  source 1..21: mol_type = other RNA
cctgaaccgcccattcctgta

SEQ ID NO: 512 - RNA, 21 nt, synthetic construct
  source 1..21: mol_type = other RNA
ctgaaccgcccattcctgtta

SEQ ID NO: 513 - RNA, 21 nt, synthetic construct
  source 1..21: mol_type = other RNA
gaaccgcccattcctgtttga

SEQ ID NO: 514 - RNA, 21 nt, synthetic construct
  source 1..21: mol_type = other RNA
aaccgcccattcctgtttgca

SEQ ID NO: 515 - RNA, 21 nt, synthetic construct
  source 1..21: mol_type = other RNA
accgcccattcctgtttgcta

SEQ ID NO: 516 - RNA, 21 nt, synthetic construct
  source 1..21: mol_type = other RNA
cctgtttgctgtgtatgatca

SEQ ID NO: 517 - RNA, 21 nt, synthetic construct
  source 1..21: mol_type = other RNA
tgctgtgtatgatcaaagcga

SEQ ID NO: 518 - RNA, 21 nt, synthetic construct
  source 1..21: mol_type = other RNA
gctgtgtatgatcaaagcgca

SEQ ID NO: 519 - RNA, 21 nt, synthetic construct
  source 1..21: mol_type = other RNA
ctgtgtatgatcaaagcgcca

SEQ ID NO: 520 - RNA, 21 nt, synthetic construct
  source 1..21: mol_type = other RNA
tgtatgatcaaagcgccacta

SEQ ID NO: 521 - RNA, 21 nt, synthetic construct
  source 1..21: mol_type = other RNA
tatgatcaaagcgccactgca

SEQ ID NO: 522 - RNA, 21 nt, synthetic construct
  source 1..21: mol_type = other RNA
tgatcaaagcgccactgccca

SEQ ID NO: 523 - RNA, 21 nt, synthetic construct
  source 1..21: mol_type = other RNA
gatcaaagcgccactgcccta

SEQ ID NO: 524 - RNA, 21 nt, synthetic construct
  source 1..21: mol_type = other RNA
atcaaagcgccactgccctga

SEQ ID NO: 525 - RNA, 21 nt, synthetic construct
  source 1..21: mol_type = other RNA
ggccgcgtggccaacccgcta

SEQ ID NO: 526 - RNA, 21 nt, synthetic construct
  source 1..21: mol_type = other RNA
acccgctgagcacagcatgaa

SEQ ID NO: 527 - RNA, 21 nt, synthetic construct
  source 1..21: mol_type = other RNA
gcctttgaggcaaaggccaga

SEQ ID NO: 528 - RNA, 21 nt, synthetic construct
  source 1..21: mol_type = other RNA
cctttgaggcaaaggccagca

SEQ ID NO: 529 - RNA, 21 nt, synthetic construct
  source 1..21: mol_type = other RNA
gcagataacaaccccggacaa

SEQ ID NO: 530 - RNA, 21 nt, synthetic construct
  source 1..21: mol_type = other RNA
ccttttcttctaatgagtcga

SEQ ID NO: 531 - RNA, 21 nt, synthetic construct
  source 1..21: mol_type = other RNA
cttttcttctaatgagtcgaa

SEQ ID NO: 532 - RNA, 21 nt, synthetic construct
  source 1..21: mol_type = other RNA
ttttcttctaatgagtcgaca

SEQ ID NO: 533 - RNA, 21 nt, synthetic construct
  source 1..21: mol_type = other RNA
tttcttctaatgagtcgacta

SEQ ID NO: 534 - RNA, 21 nt, synthetic construct
  source 1..21: mol_type = other RNA
ttcttctaatgagtcgactta

SEQ ID NO: 535 - RNA, 21 nt, synthetic construct
  source 1..21: mol_type = other RNA
ttctaatgagtcgactttgaa

SEQ ID NO: 536 - RNA, 21 nt, synthetic construct
  source 1..21: mol_type = other RNA
ttgagctggaaagcagccgta

SEQ ID NO: 537 - RNA, 21 nt, synthetic construct
  source 1..21: mol_type = other RNA
cagccgtttctccttggtcta

SEQ ID NO: 538 - RNA, 21 nt, synthetic construct
  source 1..21: mol_type = other RNA
ccgtttctccttggtctaaga

SEQ ID NO: 539 - RNA, 21 nt, synthetic construct
  source 1..21: mol_type = other RNA
cgtttctccttggtctaagta

SEQ ID NO: 540 - RNA, 21 nt, synthetic construct
  source 1..21: mol_type = other RNA
gcaagaaccagtgtttagcga

SEQ ID NO: 541 - RNA, 21 nt, synthetic construct
  source 1..21: mol_type = other RNA
caagaaccagtgtttagcgca

SEQ ID NO: 542 - RNA, 21 nt, synthetic construct
  source 1..21: mol_type = other RNA
aagaaccagtgtttagcgcga

SEQ ID NO: 543 - RNA, 21 nt, synthetic construct
  source 1..21: mol_type = other RNA
aaccagtgtttagcgcgggaa

SEQ ID NO: 544 - RNA, 21 nt, synthetic construct
  source 1..21: mol_type = other RNA
ccagtgtttagcgcgggacta

SEQ ID NO: 545 - RNA, 21 nt, synthetic construct
  source 1..21: mol_type = other RNA
agtgtttagcgcgggactaca

SEQ ID NO: 546 - RNA, 21 nt, synthetic construct
  source 1..21: mol_type = other RNA
ttagcgcgggactactgttca

SEQ ID NO: 547 - RNA, 21 nt, synthetic construct
  source 1..21: mol_type = other RNA
tagcgcgggactactgttcca

SEQ ID NO: 548 - RNA, 21 nt, synthetic construct
  source 1..21: mol_type = other RNA
gcgcgggactactgttccaaa

SEQ ID NO: 549 - RNA, 21 nt, synthetic construct
  source 1..21: mol_type = other RNA
caaaaagaattccaaccgaca

SEQ ID NO: 550 - RNA, 21 nt, synthetic construct
  source 1..21: mol_type = other RNA
aaaaagaattccaaccgacca

SEQ ID NO: 551 - RNA, 21 nt, synthetic construct
  source 1..21: mol_type = other RNA
agaattccaaccgaccagcta

SEQ ID NO: 552 - RNA, 21 nt, synthetic construct
  source 1..21: mol_type = other RNA
gaattccaaccgaccagctta

SEQ ID NO: 553 - RNA, 21 nt, synthetic construct
  source 1..21: mol_type = other RNA
aattccaaccgaccagcttga

SEQ ID NO: 554 - RNA, 21 nt, synthetic construct
  source 1..21: mol_type = other RNA
attccaaccgaccagcttgta

SEQ ID NO: 555 - RNA, 21 nt, synthetic construct
  source 1..21: mol_type = other RNA
ttccaaccgaccagcttgtta

SEQ ID NO: 556 - RNA, 21 nt, synthetic construct
  source 1..21: mol_type = other RNA
tccaaccgaccagcttgttta

SEQ ID NO: 557 - RNA, 21 nt, synthetic construct
  source 1..21: mol_type = other RNA
ttgccttcggtttgtatttaa

SEQ ID NO: 558 - RNA, 21 nt, synthetic construct
  source 1..21: mol_type = other RNA
tcggtttgtatttagtgtcta

SEQ ID NO: 559 - RNA, 21 nt, synthetic construct
  source 1..21: mol_type = other RNA
atgtaagaacatgacctccga

SEQ ID NO: 560 - RNA, 21 nt, synthetic construct
  source 1..21: mol_type = other RNA
gaacatgacctccgtgtagta

SEQ ID NO: 561 - RNA, 21 nt, synthetic construct
  source 1..21: mol_type = other RNA
acctccgtgtagtgtctgtaa

SEQ ID NO: 562 - RNA, 21 nt, synthetic construct
  source 1..21: mol_type = other RNA
gtagtgtctgtaataccttaa

SEQ ID NO: 563 - RNA, 21 nt, synthetic construct
  source 1..21: mol_type = other RNA
tttgaacaatacgtgaaagaa

SEQ ID NO: 564 - RNA, 21 nt, synthetic construct
  source 1..21: mol_type = other RNA
ttgaacaatacgtgaaagata

SEQ ID NO: 565 - RNA, 21 nt, synthetic construct
  source 1..21: mol_type = other RNA
tgaacaatacgtgaaagatga

SEQ ID NO: 566 - RNA, 21 nt, synthetic construct
  source 1..21: mol_type = other RNA
gaacaatacgtgaaagatgca

SEQ ID NO: 567 - RNA, 21 nt, synthetic construct
  source 1..21: mol_type = other RNA
acaatacgtgaaagatgcaaa

SEQ ID NO: 568 - RNA, 21 nt, synthetic construct
  source 1..21: mol_type = other RNA
gaaagatgcaagcacctgaaa

SEQ ID NO: 569 - RNA, 21 nt, synthetic construct
  source 1..21: mol_type = other RNA
tgaatttctgtttgaatgcga

SEQ ID NO: 570 - RNA, 21 nt, synthetic construct
  source 1..21: mol_type = other RNA
ttgtgttagtaataaacgtca

SEQ ID NO: 571 - RNA, 21 nt, synthetic construct
  source 1..21: mol_type = other RNA
gtgttagtaataaacgtctta

SEQ ID NO: 572 - RNA, 21 nt, synthetic construct
  source 1..21: mol_type = other RNA
taataaacgtcttgccacaaa

SEQ ID NO: 573 - RNA, 21 nt, synthetic construct
  source 1..21: mol_type = other RNA
aataaacgtcttgccacaata

SEQ ID NO: 574 - RNA, 21 nt, synthetic construct
  source 1..21: mol_type = other RNA
aaacgtcttgccacaataaga

SEQ ID NO: 575 - RNA, 21 nt, synthetic construct
  source 1..21: mol_type = other RNA
aacgtcttgccacaataagca

SEQ ID NO: 576 - RNA, 21 nt, synthetic construct
  source 1..21: mol_type = other RNA
acgtcttgccacaataagcca

SEQ ID NO: 577 - RNA, 21 nt, synthetic construct
  source 1..21: mol_type = other RNA
  modified_base 1..6: mod_base = OTHER; note = 2'-O-methyl ribonucleotide
  modified_base 7: mod_base = OTHER; note = 2'-fluoro ribonucleotide
  modified_base 8: mod_base = OTHER; note = 2'-O-methyl ribonucleotide
  modified_base 9: mod_base = OTHER; note = 2'-fluoro ribonucleotide
  modified_base 10: mod_base = OTHER; note = 2'-O-methyl ribonucleotide
  modified_base 11: mod_base = OTHER; note = 2'-fluoro ribonucleotide
  modified_base 12..21: mod_base = OTHER; note = 2'-O-methyl ribonucleotide
  modified_base 1..3: mod_base = OTHER; note = phosphorothioate linkage
agggtatgcggaagcgagcaa

SEQ ID NO: 578 - RNA, 21 nt, synthetic construct
  source 1..21: mol_type = other RNA
  modified_base 1..6: mod_base = OTHER; note = 2'-O-methyl ribonucleotide
  modified_base 7: mod_base = OTHER; note = 2'-fluoro ribonucleotide
  modified_base 8: mod_base = OTHER; note = 2'-O-methyl ribonucleotide
  modified_base 9: mod_base = OTHER; note = 2'-fluoro ribonucleotide
  modified_base 10: mod_base = OTHER; note = 2'-O-methyl ribonucleotide
  modified_base 11: mod_base = OTHER; note = 2'-fluoro ribonucleotide
  modified_base 12..21: mod_base = OTHER; note = 2'-O-methyl ribonucleotide
  modified_base 1..3: mod_base = OTHER; note = phosphorothioate linkage
gggtatgcggaagcgagcaca

SEQ ID NO: 579 - RNA, 21 nt, synthetic construct
  source 1..21: mol_type = other RNA
  modified_base 1..6: mod_base = OTHER; note = 2'-O-methyl ribonucleotide
  modified_base 7: mod_base = OTHER; note = 2'-fluoro ribonucleotide
  modified_base 8: mod_base = OTHER; note = 2'-O-methyl ribonucleotide
  modified_base 9: mod_base = OTHER; note = 2'-fluoro ribonucleotide
  modified_base 10: mod_base = OTHER; note = 2'-O-methyl ribonucleotide
  modified_base 11: mod_base = OTHER; note = 2'-fluoro ribonucleotide
  modified_base 12..21: mod_base = OTHER; note = 2'-O-methyl ribonucleotide
  modified_base 1..3: mod_base = OTHER; note = phosphorothioate linkage
gtatgcggaagcgagcaccca

SEQ ID NO: 580 - RNA, 21 nt, synthetic construct
  source 1..21: mol_type = other RNA
  modified_base 1..6: mod_base = OTHER; note = 2'-O-methyl ribonucleotide
  modified_base 7: mod_base = OTHER; note = 2'-fluoro ribonucleotide
  modified_base 8: mod_base = OTHER; note = 2'-O-methyl ribonucleotide
  modified_base 9: mod_base = OTHER; note = 2'-fluoro ribonucleotide
  modified_base 10: mod_base = OTHER; note = 2'-O-methyl ribonucleotide
  modified_base 11: mod_base = OTHER; note = 2'-fluoro ribonucleotide
  modified_base 12..21: mod_base = OTHER; note = 2'-O-methyl ribonucleotide
  modified_base 1..3: mod_base = OTHER; note = phosphorothioate linkage
atgcggaagcgagcaccccaa

SEQ ID NO: 581 - RNA, 21 nt, synthetic construct
  source 1..21: mol_type = other RNA
  modified_base 1..6: mod_base = OTHER; note = 2'-O-methyl ribonucleotide
  modified_base 7: mod_base = OTHER; note = 2'-fluoro ribonucleotide
  modified_base 8: mod_base = OTHER; note = 2'-O-methyl ribonucleotide
  modified_base 9: mod_base = OTHER; note = 2'-fluoro ribonucleotide
  modified_base 10: mod_base = OTHER; note = 2'-O-methyl ribonucleotide
  modified_base 11: mod_base = OTHER; note = 2'-fluoro ribonucleotide
  modified_base 12..21: mod_base = OTHER; note = 2'-O-methyl ribonucleotide
  modified_base 1..3: mod_base = OTHER; note = phosphorothioate linkage
gagatggctcctgccggtgta

SEQ ID NO: 582 - RNA, 21 nt, synthetic construct
  source 1..21: mol_type = other RNA
  modified_base 1..6: mod_base = OTHER; note = 2'-O-methyl ribonucleotide
  modified_base 7: mod_base = OTHER; note = 2'-fluoro ribonucleotide
  modified_base 8: mod_base = OTHER; note = 2'-O-methyl ribonucleotide
  modified_base 9: mod_base = OTHER; note = 2'-fluoro ribonucleotide
  modified_base 10: mod_base = OTHER; note = 2'-O-methyl ribonucleotide
  modified_base 11: mod_base = OTHER; note = 2'-fluoro ribonucleotide
  modified_base 12..21: mod_base = OTHER; note = 2'-O-methyl ribonucleotide
  modified_base 1..3: mod_base = OTHER; note = phosphorothioate linkage
caggtgaccgggtgtacataa

SEQ ID NO: 583 - RNA, 21 nt, synthetic construct
  source 1..21: mol_type = other RNA
  modified_base 1..6: mod_base = OTHER; note = 2'-O-methyl ribonucleotide
  modified_base 7: mod_base = OTHER; note = 2'-fluoro ribonucleotide
  modified_base 8: mod_base = OTHER; note = 2'-O-methyl ribonucleotide
  modified_base 9: mod_base = OTHER; note = 2'-fluoro ribonucleotide
  modified_base 10: mod_base = OTHER; note = 2'-O-methyl ribonucleotide
  modified_base 11: mod_base = OTHER; note = 2'-fluoro ribonucleotide
  modified_base 12..21: mod_base = OTHER; note = 2'-O-methyl ribonucleotide
  modified_base 1..3: mod_base = OTHER; note = phosphorothioate linkage
gaccgggtgtacatacaccca

SEQ ID NO: 584 - RNA, 21 nt, synthetic construct
  source 1..21: mol_type = other RNA
  modified_base 1..6: mod_base = OTHER; note = 2'-O-methyl ribonucleotide
  modified_base 7: mod_base = OTHER; note = 2'-fluoro ribonucleotide
  modified_base 8: mod_base = OTHER; note = 2'-O-methyl ribonucleotide
  modified_base 9: mod_base = OTHER; note = 2'-fluoro ribonucleotide
  modified_base 10: mod_base = OTHER; note = 2'-O-methyl ribonucleotide
  modified_base 11: mod_base = OTHER; note = 2'-fluoro ribonucleotide
  modified_base 12..21: mod_base = OTHER; note = 2'-O-methyl ribonucleotide
  modified_base 1..3: mod_base = OTHER; note = phosphorothioate linkage
ccgggtgtacatacaccccta

SEQ ID NO: 585 - RNA, 21 nt, synthetic construct
  source 1..21: mol_type = other RNA
  modified_base 1..6: mod_base = OTHER; note = 2'-O-methyl ribonucleotide
  modified_base 7: mod_base = OTHER; note = 2'-fluoro ribonucleotide
  modified_base 8: mod_base = OTHER; note = 2'-O-methyl ribonucleotide
  modified_base 9: mod_base = OTHER; note = 2'-fluoro ribonucleotide
  modified_base 10: mod_base = OTHER; note = 2'-O-methyl ribonucleotide
  modified_base 11: mod_base = OTHER; note = 2'-fluoro ribonucleotide
  modified_base 12..21: mod_base = OTHER; note = 2'-O-methyl ribonucleotide
  modified_base 1..3: mod_base = OTHER; note = phosphorothioate linkage
cgggtgtacatacacccctta

SEQ ID NO: 586 - RNA, 21 nt, synthetic construct
  source 1..21: mol_type = other RNA
  modified_base 1..6: mod_base = OTHER; note = 2'-O-methyl ribonucleotide
  modified_base 7: mod_base = OTHER; note = 2'-fluoro ribonucleotide
  modified_base 8: mod_base = OTHER; note = 2'-O-methyl ribonucleotide
  modified_base 9: mod_base = OTHER; note = 2'-fluoro ribonucleotide
  modified_base 10: mod_base = OTHER; note = 2'-O-methyl ribonucleotide
  modified_base 11: mod_base = OTHER; note = 2'-fluoro ribonucleotide
  modified_base 12..21: mod_base = OTHER; note = 2'-O-methyl ribonucleotide
  modified_base 1..3: mod_base = OTHER; note = phosphorothioate linkage
gggtgtacatacaccccttca

SEQ ID NO: 587 - RNA, 21 nt, synthetic construct
  source 1..21: mol_type = other RNA
  modified_base 1..6: mod_base = OTHER; note = 2'-O-methyl ribonucleotide
  modified_base 7: mod_base = OTHER; note = 2'-fluoro ribonucleotide
  modified_base 8: mod_base = OTHER; note = 2'-O-methyl ribonucleotide
  modified_base 9: mod_base = OTHER; note = 2'-fluoro ribonucleotide
  modified_base 10: mod_base = OTHER; note = 2'-O-methyl ribonucleotide
  modified_base 11: mod_base = OTHER; note = 2'-fluoro ribonucleotide
  modified_base 12..21: mod_base = OTHER; note = 2'-O-methyl ribonucleotide
  modified_base 1..3: mod_base = OTHER; note = phosphorothioate linkage
gtacatacaccccttccacca

SEQ ID NO: 588 - RNA, 21 nt, synthetic construct
  source 1..21: mol_type = other RNA
  modified_base 1..6: mod_base = OTHER; note = 2'-O-methyl ribonucleotide
  modified_base 7: mod_base = OTHER; note = 2'-fluoro ribonucleotide
  modified_base 8: mod_base = OTHER; note = 2'-O-methyl ribonucleotide
  modified_base 9: mod_base = OTHER; note = 2'-fluoro ribonucleotide
  modified_base 10: mod_base = OTHER; note = 2'-O-methyl ribonucleotide
  modified_base 11: mod_base = OTHER; note = 2'-fluoro ribonucleotide
  modified_base 12..21: mod_base = OTHER; note = 2'-O-methyl ribonucleotide
  modified_base 1..3: mod_base = OTHER; note = phosphorothioate linkage
tacatacaccccttccaccta

SEQ ID NO: 589 - RNA, 21 nt, synthetic construct
  source 1..21: mol_type = other RNA
  modified_base 1..6: mod_base = OTHER; note = 2'-O-methyl ribonucleotide
  modified_base 7: mod_base = OTHER; note = 2'-fluoro ribonucleotide
  modified_base 8: mod_base = OTHER; note = 2'-O-methyl ribonucleotide
  modified_base 9: mod_base = OTHER; note = 2'-fluoro ribonucleotide
  modified_base 10: mod_base = OTHER; note = 2'-O-methyl ribonucleotide
  modified_base 11: mod_base = OTHER; note = 2'-fluoro ribonucleotide
  modified_base 12..21: mod_base = OTHER; note = 2'-O-methyl ribonucleotide
  modified_base 1..3: mod_base = OTHER; note = phosphorothioate linkage
ctcgtcatccacaatgagaga

SEQ ID NO: 590 - RNA, 21 nt, synthetic construct
  source 1..21: mol_type = other RNA
  modified_base 1..6: mod_base = OTHER; note = 2'-O-methyl ribonucleotide
  modified_base 7: mod_base = OTHER; note = 2'-fluoro ribonucleotide
  modified_base 8: mod_base = OTHER; note = 2'-O-methyl ribonucleotide
  modified_base 9: mod_base = OTHER; note = 2'-fluoro ribonucleotide
  modified_base 10: mod_base = OTHER; note = 2'-O-methyl ribonucleotide
  modified_base 11: mod_base = OTHER; note = 2'-fluoro ribonucleotide
  modified_base 12..21: mod_base = OTHER; note = 2'-O-methyl ribonucleotide
  modified_base 1..3: mod_base = OTHER; note = phosphorothioate linkage
gtcatccacaatgagagtaca

SEQ ID NO: 591 - RNA, 21 nt, synthetic construct
  source 1..21: mol_type = other RNA
  modified_base 1..6: mod_base = OTHER; note = 2'-O-methyl ribonucleotide
  modified_base 7: mod_base = OTHER; note = 2'-fluoro ribonucleotide
  modified_base 8: mod_base = OTHER; note = 2'-O-methyl ribonucleotide
  modified_base 9: mod_base = OTHER; note = 2'-fluoro ribonucleotide
  modified_base 10: mod_base = OTHER; note = 2'-O-methyl ribonucleotide
  modified_base 11: mod_base = OTHER; note = 2'-fluoro ribonucleotide
  modified_base 12..21: mod_base = OTHER; note = 2'-O-methyl ribonucleotide
  modified_base 1..3: mod_base = OTHER; note = phosphorothioate linkage
tcatccacaatgagagtacca

SEQ ID NO: 592 - RNA, 21 nt, synthetic construct
  source 1..21: mol_type = other RNA
  modified_base 1..6: mod_base = OTHER; note = 2'-O-methyl ribonucleotide
  modified_base 7: mod_base = OTHER; note = 2'-fluoro ribonucleotide
  modified_base 8: mod_base = OTHER; note = 2'-O-methyl ribonucleotide
  modified_base 9: mod_base = OTHER; note = 2'-fluoro ribonucleotide
  modified_base 10: mod_base = OTHER; note = 2'-O-methyl ribonucleotide
  modified_base 11: mod_base = OTHER; note = 2'-fluoro ribonucleotide
  modified_base 12..21: mod_base = OTHER; note = 2'-O-methyl ribonucleotide
  modified_base 1..3: mod_base = OTHER; note = phosphorothioate linkage
catccacaatgagagtaccta

SEQ ID NO: 593 - RNA, 21 nt, synthetic construct
  source 1..21: mol_type = other RNA
  modified_base 1..6: mod_base = OTHER; note = 2'-O-methyl ribonucleotide
  modified_base 7: mod_base = OTHER; note = 2'-fluoro ribonucleotide
  modified_base 8: mod_base = OTHER; note = 2'-O-methyl ribonucleotide
  modified_base 9: mod_base = OTHER; note = 2'-fluoro ribonucleotide
  modified_base 10: mod_base = OTHER; note = 2'-O-methyl ribonucleotide
  modified_base 11: mod_base = OTHER; note = 2'-fluoro ribonucleotide
  modified_base 12..21: mod_base = OTHER; note = 2'-O-methyl ribonucleotide
  modified_base 1..3: mod_base = OTHER; note = phosphorothioate linkage
atccacaatgagagtacctga

SEQ ID NO: 594 - RNA, 21 nt, synthetic construct
  source 1..21: mol_type = other RNA
  modified_base 1..6: mod_base = OTHER; note = 2'-O-methyl ribonucleotide
  modified_base 7: mod_base = OTHER; note = 2'-fluoro ribonucleotide
  modified_base 8: mod_base = OTHER; note = 2'-O-methyl ribonucleotide
  modified_base 9: mod_base = OTHER; note = 2'-fluoro ribonucleotide
  modified_base 10: mod_base = OTHER; note = 2'-O-methyl ribonucleotide
  modified_base 11: mod_base = OTHER; note = 2'-fluoro ribonucleotide
  modified_base 12..21: mod_base = OTHER; note = 2'-O-methyl ribonucleotide
  modified_base 1..3: mod_base = OTHER; note = phosphorothioate linkage
ccacaatgagagtacctgtga

SEQ ID NO: 595 - RNA, 21 nt, synthetic construct
  source 1..21: mol_type = other RNA
  modified_base 1..6: mod_base = OTHER; note = 2'-O-methyl ribonucleotide
  modified_base 7: mod_base = OTHER; note = 2'-fluoro ribonucleotide
  modified_base 8: mod_base = OTHER; note = 2'-O-methyl ribonucleotide
  modified_base 9: mod_base = OTHER; note = 2'-fluoro ribonucleotide
  modified_base 10: mod_base = OTHER; note = 2'-O-methyl ribonucleotide
  modified_base 11: mod_base = OTHER; note = 2'-fluoro ribonucleotide
  modified_base 12..21: mod_base = OTHER; note = 2'-O-methyl ribonucleotide
  modified_base 1..3: mod_base = OTHER; note = phosphorothioate linkage
tgagagtacctgtgagcagca

SEQ ID NO: 596 - RNA, 21 nt, synthetic construct
  source 1..21: mol_type = other RNA
  modified_base 1..6: mod_base = OTHER; note = 2'-O-methyl ribonucleotide
  modified_base 7: mod_base = OTHER; note = 2'-fluoro ribonucleotide
  modified_base 8: mod_base = OTHER; note = 2'-O-methyl ribonucleotide
  modified_base 9: mod_base = OTHER; note = 2'-fluoro ribonucleotide
  modified_base 10: mod_base = OTHER; note = 2'-O-methyl ribonucleotide
  modified_base 11: mod_base = OTHER; note = 2'-fluoro ribonucleotide
  modified_base 12..21: mod_base = OTHER; note = 2'-O-methyl ribonucleotide
  modified_base 1..3: mod_base = OTHER; note = phosphorothioate linkage
ctggcaaaggccaatgccgga

SEQ ID NO: 597 - RNA, 21 nt, synthetic construct
  source 1..21: mol_type = other RNA
  modified_base 1..6: mod_base = OTHER; note = 2'-O-methyl ribonucleotide
  modified_base 7: mod_base = OTHER; note = 2'-fluoro ribonucleotide
  modified_base 8: mod_base = OTHER; note = 2'-O-methyl ribonucleotide
  modified_base 9: mod_base = OTHER; note = 2'-fluoro ribonucleotide
  modified_base 10: mod_base = OTHER; note = 2'-O-methyl ribonucleotide
  modified_base 11: mod_base = OTHER; note = 2'-fluoro ribonucleotide
  modified_base 12..21: mod_base = OTHER; note = 2'-O-methyl ribonucleotide
  modified_base 1..3: mod_base = OTHER; note = phosphorothioate linkage
gcaaaggccaatgccgggaaa

SEQ ID NO: 598 - RNA, 21 nt, synthetic construct
  source 1..21: mol_type = other RNA
  modified_base 1..6: mod_base = OTHER; note = 2'-O-methyl ribonucleotide
  modified_base 7: mod_base = OTHER; note = 2'-fluoro ribonucleotide
  modified_base 8: mod_base = OTHER; note = 2'-O-methyl ribonucleotide
  modified_base 9: mod_base = OTHER; note = 2'-fluoro ribonucleotide
  modified_base 10: mod_base = OTHER; note = 2'-O-methyl ribonucleotide
  modified_base 11: mod_base = OTHER; note = 2'-fluoro ribonucleotide
  modified_base 12..21: mod_base = OTHER; note = 2'-O-methyl ribonucleotide
  modified_base 1..3: mod_base = OTHER; note = phosphorothioate linkage
attcaggccaagacatcccca

SEQ ID NO: 599 - RNA, 21 nt, synthetic construct
  source 1..21: mol_type = other RNA
  modified_base 1..6: mod_base = OTHER; note = 2'-O-methyl ribonucleotide
  modified_base 7: mod_base = OTHER; note = 2'-fluoro ribonucleotide
  modified_base 8: mod_base = OTHER; note = 2'-O-methyl ribonucleotide
  modified_base 9: mod_base = OTHER; note = 2'-fluoro ribonucleotide
  modified_base 10: mod_base = OTHER; note = 2'-O-methyl ribonucleotide
  modified_base 11: mod_base = OTHER; note = 2'-fluoro ribonucleotide
  modified_base 12..21: mod_base = OTHER; note = 2'-O-methyl ribonucleotide
  modified_base 1..3: mod_base = OTHER; note = phosphorothioate linkage
ttcaggccaagacatccccta

SEQ ID NO: 600 - RNA, 21 nt, synthetic construct
  source 1..21: mol_type = other RNA
  modified_base 1..6: mod_base = OTHER; note = 2'-O-methyl ribonucleotide
  modified_base 7: mod_base = OTHER; note = 2'-fluoro ribonucleotide
  modified_base 8: mod_base = OTHER; note = 2'-O-methyl ribonucleotide
  modified_base 9: mod_base = OTHER; note = 2'-fluoro ribonucleotide
  modified_base 10: mod_base = OTHER; note = 2'-O-methyl ribonucleotide
  modified_base 11: mod_base = OTHER; note = 2'-fluoro ribonucleotide
  modified_base 12..21: mod_base = OTHER; note = 2'-O-methyl ribonucleotide
  modified_base 1..3: mod_base = OTHER; note = phosphorothioate linkage
tggatgaaaaggccctacaga

SEQ ID NO: 601 - RNA, 21 nt, synthetic construct
  source 1..21: mol_type = other RNA
  modified_base 1..6: mod_base = OTHER; note = 2'-O-methyl ribonucleotide
  modified_base 7: mod_base = OTHER; note = 2'-fluoro ribonucleotide
  modified_base 8: mod_base = OTHER; note = 2'-O-methyl ribonucleotide
  modified_base 9: mod_base = OTHER; note = 2'-fluoro ribonucleotide
  modified_base 10: mod_base = OTHER; note = 2'-O-methyl ribonucleotide
  modified_base 11: mod_base = OTHER; note = 2'-fluoro ribonucleotide
  modified_base 12..21: mod_base = OTHER; note = 2'-O-methyl ribonucleotide
  modified_base 1..3: mod_base = OTHER; note = phosphorothioate linkage
cagctggtgctagtcgctgca

SEQ ID NO: 602 - RNA, 21 nt, synthetic construct
  source 1..21: mol_type = other RNA
  modified_base 1..6: mod_base = OTHER; note = 2'-O-methyl ribonucleotide
  modified_base 7: mod_base = OTHER; note = 2'-fluoro ribonucleotide
  modified_base 8: mod_base = OTHER; note = 2'-O-methyl ribonucleotide
  modified_base 9: mod_base = OTHER; note = 2'-fluoro ribonucleotide
  modified_base 10: mod_base = OTHER; note = 2'-O-methyl ribonucleotide
  modified_base 11: mod_base = OTHER; note = 2'-fluoro ribonucleotide
  modified_base 12..21: mod_base = OTHER; note = 2'-O-methyl ribonucleotide
  modified_base 1..3: mod_base = OTHER; note = phosphorothioate linkage
tagtcgctgcaaaacttgaca

SEQ ID NO: 603 - RNA, 21 nt, synthetic construct
  source 1..21: mol_type = other RNA
  modified_base 1..6: mod_base = OTHER; note = 2'-O-methyl ribonucleotide
  modified_base 7: mod_base = OTHER; note = 2'-fluoro ribonucleotide
  modified_base 8: mod_base = OTHER; note = 2'-O-methyl ribonucleotide
  modified_base 9: mod_base = OTHER; note = 2'-fluoro ribonucleotide
  modified_base 10: mod_base = OTHER; note = 2'-O-methyl ribonucleotide
  modified_base 11: mod_base = OTHER; note = 2'-fluoro ribonucleotide
  modified_base 12..21: mod_base = OTHER; note = 2'-O-methyl ribonucleotide
  modified_base 1..3: mod_base = OTHER; note = phosphorothioate linkage
cgctgcaaaacttgacaccga

SEQ ID NO: 604 - RNA, 21 nt, synthetic construct
  source 1..21: mol_type = other RNA
  modified_base 1..6: mod_base = OTHER; note = 2'-O-methyl ribonucleotide
  modified_base 7: mod_base = OTHER; note = 2'-fluoro ribonucleotide
  modified_base 8: mod_base = OTHER; note = 2'-O-methyl ribonucleotide
  modified_base 9: mod_base = OTHER; note = 2'-fluoro ribonucleotide
  modified_base 10: mod_base = OTHER; note = 2'-O-methyl ribonucleotide
  modified_base 11: mod_base = OTHER; note = 2'-fluoro ribonucleotide
  modified_base 12..21: mod_base = OTHER; note = 2'-O-methyl ribonucleotide
  modified_base 1..3: mod_base = OTHER; note = phosphorothioate linkage
gctgcaaaacttgacaccgaa

SEQ ID NO: 605 - RNA, 21 nt, synthetic construct
  source 1..21: mol_type = other RNA
  modified_base 1..6: mod_base = OTHER; note = 2'-O-methyl ribonucleotide
  modified_base 7: mod_base = OTHER; note = 2'-fluoro ribonucleotide
  modified_base 8: mod_base = OTHER; note = 2'-O-methyl ribonucleotide
  modified_base 9: mod_base = OTHER; note = 2'-fluoro ribonucleotide
  modified_base 10: mod_base = OTHER; note = 2'-O-methyl ribonucleotide
  modified_base 11: mod_base = OTHER; note = 2'-fluoro ribonucleotide
  modified_base 12..21: mod_base = OTHER; note = 2'-O-methyl ribonucleotide
  modified_base 1..3: mod_base = OTHER; note = phosphorothioate linkage
cttgacaccgaagacaagtta

SEQ ID NO: 606 - RNA, 21 nt, synthetic construct
  source 1..21: mol_type = other RNA
  modified_base 1..6: mod_base = OTHER; note = 2'-O-methyl ribonucleotide
  modified_base 7: mod_base = OTHER; note = 2'-fluoro ribonucleotide
  modified_base 8: mod_base = OTHER; note = 2'-O-methyl ribonucleotide
  modified_base 9: mod_base = OTHER; note = 2'-fluoro ribonucleotide
  modified_base 10: mod_base = OTHER; note = 2'-O-methyl ribonucleotide
  modified_base 11: mod_base = OTHER; note = 2'-fluoro ribonucleotide
  modified_base 12..21: mod_base = OTHER; note = 2'-O-methyl ribonucleotide
  modified_base 1..3: mod_base = OTHER; note = phosphorothioate linkage
ttgacaccgaagacaagttga

SEQ ID NO: 607 - RNA, 21 nt, synthetic construct
  source 1..21: mol_type = other RNA
  modified_base 1..6: mod_base = OTHER; note = 2'-O-methyl ribonucleotide
  modified_base 7: mod_base = OTHER; note = 2'-fluoro ribonucleotide
  modified_base 8: mod_base = OTHER; note = 2'-O-methyl ribonucleotide
  modified_base 9: mod_base = OTHER; note = 2'-fluoro ribonucleotide
  modified_base 10: mod_base = OTHER; note = 2'-O-methyl ribonucleotide
  modified_base 11: mod_base = OTHER; note = 2'-fluoro ribonucleotide
  modified_base 12..21: mod_base = OTHER; note = 2'-O-methyl ribonucleotide
  modified_base 1..3: mod_base = OTHER; note = phosphorothioate linkage
tgacaccgaagacaagttgaa

SEQ ID NO: 608 - RNA, 21 nt, synthetic construct
  source 1..21: mol_type = other RNA
  modified_base 1..6: mod_base = OTHER; note = 2'-O-methyl ribonucleotide
  modified_base 7: mod_base = OTHER; note = 2'-fluoro ribonucleotide
  modified_base 8: mod_base = OTHER; note = 2'-O-methyl ribonucleotide
  modified_base 9: mod_base = OTHER; note = 2'-fluoro ribonucleotide
  modified_base 10: mod_base = OTHER; note = 2'-O-methyl ribonucleotide
  modified_base 11: mod_base = OTHER; note = 2'-fluoro ribonucleotide
  modified_base 12..21: mod_base = OTHER; note = 2'-O-methyl ribonucleotide
  modified_base 1..3: mod_base = OTHER; note = phosphorothioate linkage
gacaccgaagacaagttgaga

SEQ ID NO: 609 - RNA, 21 nt, synthetic construct
  source 1..21: mol_type = other RNA
  modified_base 1..6: mod_base = OTHER; note = 2'-O-methyl ribonucleotide
  modified_base 7: mod_base = OTHER; note = 2'-fluoro ribonucleotide
  modified_base 8: mod_base = OTHER; note = 2'-O-methyl ribonucleotide
  modified_base 9: mod_base = OTHER; note = 2'-fluoro ribonucleotide
  modified_base 10: mod_base = OTHER; note = 2'-O-methyl ribonucleotide
  modified_base 11: mod_base = OTHER; note = 2'-fluoro ribonucleotide
  modified_base 12..21: mod_base = OTHER; note = 2'-O-methyl ribonucleotide
  modified_base 1..3: mod_base = OTHER; note = phosphorothioate linkage
aagacaagttgagggccgcaa

SEQ ID NO: 610 - RNA, 21 nt, synthetic construct
  source 1..21: mol_type = other RNA
  modified_base 1..6: mod_base = OTHER; note = 2'-O-methyl ribonucleotide
  modified_base 7: mod_base = OTHER; note = 2'-fluoro ribonucleotide
  modified_base 8: mod_base = OTHER; note = 2'-O-methyl ribonucleotide
  modified_base 9: mod_base = OTHER; note = 2'-fluoro ribonucleotide
  modified_base 10: mod_base = OTHER; note = 2'-O-methyl ribonucleotide
  modified_base 11: mod_base = OTHER; note = 2'-fluoro ribonucleotide
  modified_base 12..21: mod_base = OTHER; note = 2'-O-methyl ribonucleotide
  modified_base 1..3: mod_base = OTHER; note = phosphorothioate linkage
agacaagttgagggccgcaaa

SEQ ID NO: 611 - RNA, 21 nt, synthetic construct
  source 1..21: mol_type = other RNA
  modified_base 1..6: mod_base = OTHER; note = 2'-O-methyl ribonucleotide
  modified_base 7: mod_base = OTHER; note = 2'-fluoro ribonucleotide
  modified_base 8: mod_base = OTHER; note = 2'-O-methyl ribonucleotide
  modified_base 9: mod_base = OTHER; note = 2'-fluoro ribonucleotide
  modified_base 10: mod_base = OTHER; note = 2'-O-methyl ribonucleotide
  modified_base 11: mod_base = OTHER; note = 2'-fluoro ribonucleotide
  modified_base 12..21: mod_base = OTHER; note = 2'-O-methyl ribonucleotide
  modified_base 1..3: mod_base = OTHER; note = phosphorothioate linkage
agggccgcaatggtcgggata

SEQ ID NO: 612 - RNA, 21 nt, synthetic construct
  source 1..21: mol_type = other RNA
  modified_base 1..6: mod_base = OTHER; note = 2'-O-methyl ribonucleotide
  modified_base 7: mod_base = OTHER; note = 2'-fluoro ribonucleotide
  modified_base 8: mod_base = OTHER; note = 2'-O-methyl ribonucleotide
  modified_base 9: mod_base = OTHER; note = 2'-fluoro ribonucleotide
  modified_base 10: mod_base = OTHER; note = 2'-O-methyl ribonucleotide
  modified_base 11: mod_base = OTHER; note = 2'-fluoro ribonucleotide
  modified_base 12..21: mod_base = OTHER; note = 2'-O-methyl ribonucleotide
  modified_base 1..3: mod_base = OTHER; note = phosphorothioate linkage
gccgcaatggtcgggatgcta

SEQ ID NO: 613 - RNA, 21 nt, synthetic construct
  source 1..21: mol_type = other RNA
  modified_base 1..6: mod_base = OTHER; note = 2'-O-methyl ribonucleotide
  modified_base 7: mod_base = OTHER; note = 2'-fluoro ribonucleotide
  modified_base 8: mod_base = OTHER; note = 2'-O-methyl ribonucleotide
  modified_base 9: mod_base = OTHER; note = 2'-fluoro ribonucleotide
  modified_base 10: mod_base = OTHER; note = 2'-O-methyl ribonucleotide
  modified_base 11: mod_base = OTHER; note = 2'-fluoro ribonucleotide
  modified_base 12..21: mod_base = OTHER; note = 2'-O-methyl ribonucleotide
  modified_base 1..3: mod_base = OTHER; note = phosphorothioate linkage
aatggtcgggatgctggccaa

SEQ ID NO: 614 - RNA, 21 nt, synthetic construct
  source 1..21: mol_type = other RNA
  modified_base 1..6: mod_base = OTHER; note = 2'-O-methyl ribonucleotide
  modified_base 7: mod_base = OTHER; note = 2'-fluoro ribonucleotide
  modified_base 8: mod_base = OTHER; note = 2'-O-methyl ribonucleotide
  modified_base 9: mod_base = OTHER; note = 2'-fluoro ribonucleotide
  modified_base 10: mod_base = OTHER; note = 2'-O-methyl ribonucleotide
  modified_base 11: mod_base = OTHER; note = 2'-fluoro ribonucleotide
  modified_base 12..21: mod_base = OTHER; note = 2'-O-methyl ribonucleotide
  modified_base 1..3: mod_base = OTHER; note = phosphorothioate linkage
atggtcgggatgctggccaaa

SEQ ID NO: 615 - RNA, 21 nt, synthetic construct
  source 1..21: mol_type = other RNA
  modified_base 1..6: mod_base = OTHER; note = 2'-O-methyl ribonucleotide
  modified_base 7: mod_base = OTHER; note = 2'-fluoro ribonucleotide
  modified_base 8: mod_base = OTHER; note = 2'-O-methyl ribonucleotide
  modified_base 9: mod_base = OTHER; note = 2'-fluoro ribonucleotide
  modified_base 10: mod_base = OTHER; note = 2'-O-methyl ribonucleotide
  modified_base 11: mod_base = OTHER; note = 2'-fluoro ribonucleotide
  modified_base 12..21: mod_base = OTHER; note = 2'-O-methyl ribonucleotide
  modified_base 1..3: mod_base = OTHER; note = phosphorothioate linkage
ccaacttcttgggcttccgta

SEQ ID NO: 616 - RNA, 21 nt, synthetic construct
  source 1..21: mol_type = other RNA
  modified_base 1..6: mod_base = OTHER; note = 2'-O-methyl ribonucleotide
  modified_base 7: mod_base = OTHER; note = 2'-fluoro ribonucleotide
  modified_base 8: mod_base = OTHER; note = 2'-O-methyl ribonucleotide
  modified_base 9: mod_base = OTHER; note = 2'-fluoro ribonucleotide
  modified_base 10: mod_base = OTHER; note = 2'-O-methyl ribonucleotide
  modified_base 11: mod_base = OTHER; note = 2'-fluoro ribonucleotide
  modified_base 12..21: mod_base = OTHER; note = 2'-O-methyl ribonucleotide
  modified_base 1..3: mod_base = OTHER; note = phosphorothioate linkage
caacttcttgggcttccgtaa

SEQ ID NO: 617 - RNA, 21 nt, synthetic construct
  source 1..21: mol_type = other RNA
  modified_base 1..6: mod_base = OTHER; note = 2'-O-methyl ribonucleotide
  modified_base 7: mod_base = OTHER; note = 2'-fluoro ribonucleotide
  modified_base 8: mod_base = OTHER; note = 2'-O-methyl ribonucleotide
  modified_base 9: mod_base = OTHER; note = 2'-fluoro ribonucleotide
  modified_base 10: mod_base = OTHER; note = 2'-O-methyl ribonucleotide
  modified_base 11: mod_base = OTHER; note = 2'-fluoro ribonucleotide
  modified_base 12..21: mod_base = OTHER; note = 2'-O-methyl ribonucleotide
  modified_base 1..3: mod_base = OTHER; note = phosphorothioate linkage
aacttcttgggcttccgtata

SEQ ID NO: 618 - RNA, 21 nt, synthetic construct
  source 1..21: mol_type = other RNA
  modified_base 1..6: mod_base = OTHER; note = 2'-O-methyl ribonucleotide
  modified_base 7: mod_base = OTHER; note = 2'-fluoro ribonucleotide
  modified_base 8: mod_base = OTHER; note = 2'-O-methyl ribonucleotide
  modified_base 9: mod_base = OTHER; note = 2'-fluoro ribonucleotide
  modified_base 10: mod_base = OTHER; note = 2'-O-methyl ribonucleotide
  modified_base 11: mod_base = OTHER; note = 2'-fluoro ribonucleotide
  modified_base 12..21: mod_base = OTHER; note = 2'-O-methyl ribonucleotide
  modified_base 1..3: mod_base = OTHER; note = phosphorothioate linkage
cttcttgggcttccgtatata

SEQ ID NO: 619 - RNA, 21 nt, synthetic construct
  source 1..21: mol_type = other RNA
  modified_base 1..6: mod_base = OTHER; note = 2'-O-methyl ribonucleotide
  modified_base 7: mod_base = OTHER; note = 2'-fluoro ribonucleotide
  modified_base 8: mod_base = OTHER; note = 2'-O-methyl ribonucleotide
  modified_base 9: mod_base = OTHER; note = 2'-fluoro ribonucleotide
  modified_base 10: mod_base = OTHER; note = 2'-O-methyl ribonucleotide
  modified_base 11: mod_base = OTHER; note = 2'-fluoro ribonucleotide
  modified_base 12..21: mod_base = OTHER; note = 2'-O-methyl ribonucleotide
  modified_base 1..3: mod_base = OTHER; note = phosphorothioate linkage
ttcttgggcttccgtatataa

SEQ ID NO: 620 - RNA, 21 nt, synthetic construct
  source 1..21: mol_type = other RNA
  modified_base 1..6: mod_base = OTHER; note = 2'-O-methyl ribonucleotide
  modified_base 7: mod_base = OTHER; note = 2'-fluoro ribonucleotide
  modified_base 8: mod_base = OTHER; note = 2'-O-methyl ribonucleotide
  modified_base 9: mod_base = OTHER; note = 2'-fluoro ribonucleotide
  modified_base 10: mod_base = OTHER; note = 2'-O-methyl ribonucleotide
  modified_base 11: mod_base = OTHER; note = 2'-fluoro ribonucleotide
  modified_base 12..21: mod_base = OTHER; note = 2'-O-methyl ribonucleotide
  modified_base 1..3: mod_base = OTHER; note = phosphorothioate linkage
tcttgggcttccgtatatata

SEQ ID NO: 621 - RNA, 21 nt, synthetic construct
  source 1..21: mol_type = other RNA
  modified_base 1..6: mod_base = OTHER; note = 2'-O-methyl ribonucleotide
  modified_base 7: mod_base = OTHER; note = 2'-fluoro ribonucleotide
  modified_base 8: mod_base = OTHER; note = 2'-O-methyl ribonucleotide
  modified_base 9: mod_base = OTHER; note = 2'-fluoro ribonucleotide
  modified_base 10: mod_base = OTHER; note = 2'-O-methyl ribonucleotide
  modified_base 11: mod_base = OTHER; note = 2'-fluoro ribonucleotide
  modified_base 12..21: mod_base = OTHER; note = 2'-O-methyl ribonucleotide
  modified_base 1..3: mod_base = OTHER; note = phosphorothioate linkage
cttgggcttccgtatatatga

SEQ ID NO: 622 - RNA, 21 nt, synthetic construct
  source 1..21: mol_type = other RNA
  modified_base 1..6: mod_base = OTHER; note = 2'-O-methyl ribonucleotide
  modified_base 7: mod_base = OTHER; note = 2'-fluoro ribonucleotide
  modified_base 8: mod_base = OTHER; note = 2'-O-methyl ribonucleotide
  modified_base 9: mod_base = OTHER; note = 2'-fluoro ribonucleotide
  modified_base 10: mod_base = OTHER; note = 2'-O-methyl ribonucleotide
  modified_base 11: mod_base = OTHER; note = 2'-fluoro ribonucleotide
  modified_base 12..21: mod_base = OTHER; note = 2'-O-methyl ribonucleotide
  modified_base 1..3: mod_base = OTHER; note = phosphorothioate linkage
ttgggcttccgtatatatgga

SEQ ID NO: 623 - RNA, 21 nt, synthetic construct
  source 1..21: mol_type = other RNA
  modified_base 1..6: mod_base = OTHER; note = 2'-O-methyl ribonucleotide
  modified_base 7: mod_base = OTHER; note = 2'-fluoro ribonucleotide
  modified_base 8: mod_base = OTHER; note = 2'-O-methyl ribonucleotide
  modified_base 9: mod_base = OTHER; note = 2'-fluoro ribonucleotide
  modified_base 10: mod_base = OTHER; note = 2'-O-methyl ribonucleotide
  modified_base 11: mod_base = OTHER; note = 2'-fluoro ribonucleotide
  modified_base 12..21: mod_base = OTHER; note = 2'-O-methyl ribonucleotide
  modified_base 1..3: mod_base = OTHER; note = phosphorothioate linkage
gggcttccgtatatatggcaa

SEQ ID NO: 624 - RNA, 21 nt, synthetic construct
  source 1..21: mol_type = other RNA
  modified_base 1..6: mod_base = OTHER; note = 2'-O-methyl ribonucleotide
  modified_base 7: mod_base = OTHER; note = 2'-fluoro ribonucleotide
  modified_base 8: mod_base = OTHER; note = 2'-O-methyl ribonucleotide
  modified_base 9: mod_base = OTHER; note = 2'-fluoro ribonucleotide
  modified_base 10: mod_base = OTHER; note = 2'-O-methyl ribonucleotide
  modified_base 11: mod_base = OTHER; note = 2'-fluoro ribonucleotide
  modified_base 12..21: mod_base = OTHER; note = 2'-O-methyl ribonucleotide
  modified_base 1..3: mod_base = OTHER; note = phosphorothioate linkage
ggcttccgtatatatggcata

SEQ ID NO: 625 - RNA, 21 nt, synthetic construct
  source 1..21: mol_type = other RNA
  modified_base 1..6: mod_base = OTHER; note = 2'-O-methyl ribonucleotide
  modified_base 7: mod_base = OTHER; note = 2'-fluoro ribonucleotide
  modified_base 8: mod_base = OTHER; note = 2'-O-methyl ribonucleotide
  modified_base 9: mod_base = OTHER; note = 2'-fluoro ribonucleotide
  modified_base 10: mod_base = OTHER; note = 2'-O-methyl ribonucleotide
  modified_base 11: mod_base = OTHER; note = 2'-fluoro ribonucleotide
  modified_base 12..21: mod_base = OTHER; note = 2'-O-methyl ribonucleotide
  modified_base 1..3: mod_base = OTHER; note = phosphorothioate linkage
cttccgtatatatggcatgca

SEQ ID NO: 626 - RNA, 21 nt, synthetic construct
  source 1..21: mol_type = other RNA
  modified_base 1..6: mod_base = OTHER; note = 2'-O-methyl ribonucleotide
  modified_base 7: mod_base = OTHER; note = 2'-fluoro ribonucleotide
  modified_base 8: mod_base = OTHER; note = 2'-O-methyl ribonucleotide
  modified_base 9: mod_base = OTHER; note = 2'-fluoro ribonucleotide
  modified_base 10: mod_base = OTHER; note = 2'-O-methyl ribonucleotide
  modified_base 11: mod_base = OTHER; note = 2'-fluoro ribonucleotide
  modified_base 12..21: mod_base = OTHER; note = 2'-O-methyl ribonucleotide
  modified_base 1..3: mod_base = OTHER; note = phosphorothioate linkage
ttccgtatatatggcatgcaa

SEQ ID NO: 627 - RNA, 21 nt, synthetic construct
  source 1..21: mol_type = other RNA
  modified_base 1..6: mod_base = OTHER; note = 2'-O-methyl ribonucleotide
  modified_base 7: mod_base = OTHER; note = 2'-fluoro ribonucleotide
  modified_base 8: mod_base = OTHER; note = 2'-O-methyl ribonucleotide
  modified_base 9: mod_base = OTHER; note = 2'-fluoro ribonucleotide
  modified_base 10: mod_base = OTHER; note = 2'-O-methyl ribonucleotide
  modified_base 11: mod_base = OTHER; note = 2'-fluoro ribonucleotide
  modified_base 12..21: mod_base = OTHER; note = 2'-O-methyl ribonucleotide
  modified_base 1..3: mod_base = OTHER; note = phosphorothioate linkage
tccgtatatatggcatgcaca

SEQ ID NO: 628 - RNA, 21 nt, synthetic construct
  source 1..21: mol_type = other RNA
  modified_base 1..6: mod_base = OTHER; note = 2'-O-methyl ribonucleotide
  modified_base 7: mod_base = OTHER; note = 2'-fluoro ribonucleotide
  modified_base 8: mod_base = OTHER; note = 2'-O-methyl ribonucleotide
  modified_base 9: mod_base = OTHER; note = 2'-fluoro ribonucleotide
  modified_base 10: mod_base = OTHER; note = 2'-O-methyl ribonucleotide
  modified_base 11: mod_base = OTHER; note = 2'-fluoro ribonucleotide
  modified_base 12..21: mod_base = OTHER; note = 2'-O-methyl ribonucleotide
  modified_base 1..3: mod_base = OTHER; note = phosphorothioate linkage
gtatatatggcatgcacagta

SEQ ID NO: 629 - RNA, 21 nt, synthetic construct
  source 1..21: mol_type = other RNA
  modified_base 1..6: mod_base = OTHER; note = 2'-O-methyl ribonucleotide
  modified_base 7: mod_base = OTHER; note = 2'-fluoro ribonucleotide
  modified_base 8: mod_base = OTHER; note = 2'-O-methyl ribonucleotide
  modified_base 9: mod_base = OTHER; note = 2'-fluoro ribonucleotide
  modified_base 10: mod_base = OTHER; note = 2'-O-methyl ribonucleotide
  modified_base 11: mod_base = OTHER; note = 2'-fluoro ribonucleotide
  modified_base 12..21: mod_base = OTHER; note = 2'-O-methyl ribonucleotide
  modified_base 1..3: mod_base = OTHER; note = phosphorothioate linkage
atatggcatgcacagtgagca

SEQ ID NO: 630 - RNA, 21 nt, synthetic construct
  source 1..21: mol_type = other RNA
  modified_base 1..6: mod_base = OTHER; note = 2'-O-methyl ribonucleotide
  modified_base 7: mod_base = OTHER; note = 2'-fluoro ribonucleotide
  modified_base 8: mod_base = OTHER; note = 2'-O-methyl ribonucleotide
  modified_base 9: mod_base = OTHER; note = 2'-fluoro ribonucleotide
  modified_base 10: mod_base = OTHER; note = 2'-O-methyl ribonucleotide
  modified_base 11: mod_base = OTHER; note = 2'-fluoro ribonucleotide
  modified_base 12..21: mod_base = OTHER; note = 2'-O-methyl ribonucleotide
  modified_base 1..3: mod_base = OTHER; note = phosphorothioate linkage
atggcatgcacagtgagctaa

SEQ ID NO: 631 - RNA, 21 nt, synthetic construct
  source 1..21: mol_type = other RNA
  modified_base 1..6: mod_base = OTHER; note = 2'-O-methyl ribonucleotide
  modified_base 7: mod_base = OTHER; note = 2'-fluoro ribonucleotide
  modified_base 8: mod_base = OTHER; note = 2'-O-methyl ribonucleotide
  modified_base 9: mod_base = OTHER; note = 2'-fluoro ribonucleotide
  modified_base 10: mod_base = OTHER; note = 2'-O-methyl ribonucleotide
  modified_base 11: mod_base = OTHER; note = 2'-fluoro ribonucleotide
  modified_base 12..21: mod_base = OTHER; note = 2'-O-methyl ribonucleotide
  modified_base 1..3: mod_base = OTHER; note = phosphorothioate linkage
tggcatgcacagtgagctata

SEQ ID NO: 632 - RNA, 21 nt, synthetic construct
  source 1..21: mol_type = other RNA
  modified_base 1..6: mod_base = OTHER; note = 2'-O-methyl ribonucleotide
  modified_base 7: mod_base = OTHER; note = 2'-fluoro ribonucleotide
  modified_base 8: mod_base = OTHER; note = 2'-O-methyl ribonucleotide
  modified_base 9: mod_base = OTHER; note = 2'-fluoro ribonucleotide
  modified_base 10: mod_base = OTHER; note = 2'-O-methyl ribonucleotide
  modified_base 11: mod_base = OTHER; note = 2'-fluoro ribonucleotide
  modified_base 12..21: mod_base = OTHER; note = 2'-O-methyl ribonucleotide
  modified_base 1..3: mod_base = OTHER; note = phosphorothioate linkage
cacagtgagctatggggcgta

SEQ ID NO: 633 - RNA, 21 nt, synthetic construct
  source 1..21: mol_type = other RNA
  modified_base 1..6: mod_base = OTHER; note = 2'-O-methyl ribonucleotide
  modified_base 7: mod_base = OTHER; note = 2'-fluoro ribonucleotide
  modified_base 8: mod_base = OTHER; note = 2'-O-methyl ribonucleotide
  modified_base 9: mod_base = OTHER; note = 2'-fluoro ribonucleotide
  modified_base 10: mod_base = OTHER; note = 2'-O-methyl ribonucleotide
  modified_base 11: mod_base = OTHER; note = 2'-fluoro ribonucleotide
  modified_base 12..21: mod_base = OTHER; note = 2'-O-methyl ribonucleotide
  modified_base 1..3: mod_base = OTHER; note = phosphorothioate linkage
acagtgagctatggggcgtga

SEQ ID NO: 634 - RNA, 21 nt, synthetic construct
  source 1..21: mol_type = other RNA
  modified_base 1..6: mod_base = OTHER; note = 2'-O-methyl ribonucleotide
  modified_base 7: mod_base = OTHER; note = 2'-fluoro ribonucleotide
  modified_base 8: mod_base = OTHER; note = 2'-O-methyl ribonucleotide
  modified_base 9: mod_base = OTHER; note = 2'-fluoro ribonucleotide
  modified_base 10: mod_base = OTHER; note = 2'-O-methyl ribonucleotide
  modified_base 11: mod_base = OTHER; note = 2'-fluoro ribonucleotide
  modified_base 12..21: mod_base = OTHER; note = 2'-O-methyl ribonucleotide
  modified_base 1..3: mod_base = OTHER; note = phosphorothioate linkage
cagtgagctatggggcgtgga

SEQ ID NO: 635 - RNA, 21 nt, synthetic construct
  source 1..21: mol_type = other RNA
  modified_base 1..6: mod_base = OTHER; note = 2'-O-methyl ribonucleotide
  modified_base 7: mod_base = OTHER; note = 2'-fluoro ribonucleotide
  modified_base 8: mod_base = OTHER; note = 2'-O-methyl ribonucleotide
  modified_base 9: mod_base = OTHER; note = 2'-fluoro ribonucleotide
  modified_base 10: mod_base = OTHER; note = 2'-O-methyl ribonucleotide
  modified_base 11: mod_base = OTHER; note = 2'-fluoro ribonucleotide
  modified_base 12..21: mod_base = OTHER; note = 2'-O-methyl ribonucleotide
  modified_base 1..3: mod_base = OTHER; note = phosphorothioate linkage
gtgagctatggggcgtggtca

SEQ ID NO: 636 - RNA, 21 nt, synthetic construct
  source 1..21: mol_type = other RNA
  modified_base 1..6: mod_base = OTHER; note = 2'-O-methyl ribonucleotide
  modified_base 7: mod_base = OTHER; note = 2'-fluoro ribonucleotide
  modified_base 8: mod_base = OTHER; note = 2'-O-methyl ribonucleotide
  modified_base 9: mod_base = OTHER; note = 2'-fluoro ribonucleotide
  modified_base 10: mod_base = OTHER; note = 2'-O-methyl ribonucleotide
  modified_base 11: mod_base = OTHER; note = 2'-fluoro ribonucleotide
  modified_base 12..21: mod_base = OTHER; note = 2'-O-methyl ribonucleotide
  modified_base 1..3: mod_base = OTHER; note = phosphorothioate linkage
tgagctatggggcgtggtcca

SEQ ID NO: 637 - RNA, 21 nt, synthetic construct
  source 1..21: mol_type = other RNA
  modified_base 1..6: mod_base = OTHER; note = 2'-O-methyl ribonucleotide
  modified_base 7: mod_base = OTHER; note = 2'-fluoro ribonucleotide
  modified_base 8: mod_base = OTHER; note = 2'-O-methyl ribonucleotide
  modified_base 9: mod_base = OTHER; note = 2'-fluoro ribonucleotide
  modified_base 10: mod_base = OTHER; note = 2'-O-methyl ribonucleotide
  modified_base 11: mod_base = OTHER; note = 2'-fluoro ribonucleotide
  modified_base 12..21: mod_base = OTHER; note = 2'-O-methyl ribonucleotide
  modified_base 1..3: mod_base = OTHER; note = phosphorothioate linkage
gagctatggggcgtggtccaa

SEQ ID NO: 638 - RNA, 21 nt, synthetic construct
  source 1..21: mol_type = other RNA
  modified_base 1..6: mod_base = OTHER; note = 2'-O-methyl ribonucleotide
  modified_base 7: mod_base = OTHER; note = 2'-fluoro ribonucleotide
  modified_base 8: mod_base = OTHER; note = 2'-O-methyl ribonucleotide
  modified_base 9: mod_base = OTHER; note = 2'-fluoro ribonucleotide
  modified_base 10: mod_base = OTHER; note = 2'-O-methyl ribonucleotide
  modified_base 11: mod_base = OTHER; note = 2'-fluoro ribonucleotide
  modified_base 12..21: mod_base = OTHER; note = 2'-O-methyl ribonucleotide
  modified_base 1..3: mod_base = OTHER; note = phosphorothioate linkage
ctatggggcgtggtccatgga

SEQ ID NO: 639 - RNA, 21 nt, synthetic construct
  source 1..21: mol_type = other RNA
  modified_base 1..6: mod_base = OTHER; note = 2'-O-methyl ribonucleotide
  modified_base 7: mod_base = OTHER; note = 2'-fluoro ribonucleotide
  modified_base 8: mod_base = OTHER; note = 2'-O-methyl ribonucleotide
  modified_base 9: mod_base = OTHER; note = 2'-fluoro ribonucleotide
  modified_base 10: mod_base = OTHER; note = 2'-O-methyl ribonucleotide
  modified_base 11: mod_base = OTHER; note = 2'-fluoro ribonucleotide
  modified_base 12..21: mod_base = OTHER; note = 2'-O-methyl ribonucleotide
  modified_base 1..3: mod_base = OTHER; note = phosphorothioate linkage
cgtggtccatggggccaccga

SEQ ID NO: 640 - RNA, 21 nt, synthetic construct
  source 1..21: mol_type = other RNA
  modified_base 1..6: mod_base = OTHER; note = 2'-O-methyl ribonucleotide
  modified_base 7: mod_base = OTHER; note = 2'-fluoro ribonucleotide
  modified_base 8: mod_base = OTHER; note = 2'-O-methyl ribonucleotide
  modified_base 9: mod_base = OTHER; note = 2'-fluoro ribonucleotide
  modified_base 10: mod_base = OTHER; note = 2'-O-methyl ribonucleotide
  modified_base 11: mod_base = OTHER; note = 2'-fluoro ribonucleotide
  modified_base 12..21: mod_base = OTHER; note = 2'-O-methyl ribonucleotide
  modified_base 1..3: mod_base = OTHER; note = phosphorothioate linkage
ccccaacggctgtctttggca

SEQ ID NO: 641 - RNA, 21 nt, synthetic construct
  source 1..21: mol_type = other RNA
  modified_base 1..6: mod_base = OTHER; note = 2'-O-methyl ribonucleotide
  modified_base 7: mod_base = OTHER; note = 2'-fluoro ribonucleotide
  modified_base 8: mod_base = OTHER; note = 2'-O-methyl ribonucleotide
  modified_base 9: mod_base = OTHER; note = 2'-fluoro ribonucleotide
  modified_base 10: mod_base = OTHER; note = 2'-O-methyl ribonucleotide
  modified_base 11: mod_base = OTHER; note = 2'-fluoro ribonucleotide
  modified_base 12..21: mod_base = OTHER; note = 2'-O-methyl ribonucleotide
  modified_base 1..3: mod_base = OTHER; note = phosphorothioate linkage
caacggctgtctttggcacca

SEQ ID NO: 642 - RNA, 21 nt, synthetic construct
  source 1..21: mol_type = other RNA
  modified_base 1..6: mod_base = OTHER; note = 2'-O-methyl ribonucleotide
  modified_base 7: mod_base = OTHER; note = 2'-fluoro ribonucleotide
  modified_base 8: mod_base = OTHER; note = 2'-O-methyl ribonucleotide
  modified_base 9: mod_base = OTHER; note = 2'-fluoro ribonucleotide
  modified_base 10: mod_base = OTHER; note = 2'-O-methyl ribonucleotide
  modified_base 11: mod_base = OTHER; note = 2'-fluoro ribonucleotide
  modified_base 12..21: mod_base = OTHER; note = 2'-O-methyl ribonucleotide
  modified_base 1..3: mod_base = OTHER; note = phosphorothioate linkage
aacggctgtctttggcaccca

SEQ ID NO: 643 - RNA, 21 nt, synthetic construct
  source 1..21: mol_type = other RNA
  modified_base 1..6: mod_base = OTHER; note = 2'-O-methyl ribonucleotide
  modified_base 7: mod_base = OTHER; note = 2'-fluoro ribonucleotide
  modified_base 8: mod_base = OTHER; note = 2'-O-methyl ribonucleotide
  modified_base 9: mod_base = OTHER; note = 2'-fluoro ribonucleotide
  modified_base 10: mod_base = OTHER; note = 2'-O-methyl ribonucleotide
  modified_base 11: mod_base = OTHER; note = 2'-fluoro ribonucleotide
  modified_base 12..21: mod_base = OTHER; note = 2'-O-methyl ribonucleotide
  modified_base 1..3: mod_base = OTHER; note = phosphorothioate linkage
accacacagctgacaggctaa

SEQ ID NO: 644 - RNA, 21 nt, synthetic construct
  source 1..21: mol_type = other RNA
  modified_base 1..6: mod_base = OTHER; note = 2'-O-methyl ribonucleotide
  modified_base 7: mod_base = OTHER; note = 2'-fluoro ribonucleotide
  modified_base 8: mod_base = OTHER; note = 2'-O-methyl ribonucleotide
  modified_base 9: mod_base = OTHER; note = 2'-fluoro ribonucleotide
  modified_base 10: mod_base = OTHER; note = 2'-O-methyl ribonucleotide
  modified_base 11: mod_base = OTHER; note = 2'-fluoro ribonucleotide
  modified_base 12..21: mod_base = OTHER; note = 2'-O-methyl ribonucleotide
  modified_base 1..3: mod_base = OTHER; note = phosphorothioate linkage
ccacacagctgacaggctaca

SEQ ID NO: 645 - RNA, 21 nt, synthetic construct
  source 1..21: mol_type = other RNA
  modified_base 1..6: mod_base = OTHER; note = 2'-O-methyl ribonucleotide
  modified_base 7: mod_base = OTHER; note = 2'-fluoro ribonucleotide
  modified_base 8: mod_base = OTHER; note = 2'-O-methyl ribonucleotide
  modified_base 9: mod_base = OTHER; note = 2'-fluoro ribonucleotide
  modified_base 10: mod_base = OTHER; note = 2'-O-methyl ribonucleotide
  modified_base 11: mod_base = OTHER; note = 2'-fluoro ribonucleotide
  modified_base 12..21: mod_base = OTHER; note = 2'-O-methyl ribonucleotide
  modified_base 1..3: mod_base = OTHER; note = phosphorothioate linkage
cacacagctgacaggctacaa

SEQ ID NO: 646 - RNA, 21 nt, synthetic construct
  source 1..21: mol_type = other RNA
  modified_base 1..6: mod_base = OTHER; note = 2'-O-methyl ribonucleotide
  modified_base 7: mod_base = OTHER; note = 2'-fluoro ribonucleotide
  modified_base 8: mod_base = OTHER; note = 2'-O-methyl ribonucleotide
  modified_base 9: mod_base = OTHER; note = 2'-fluoro ribonucleotide
  modified_base 10: mod_base = OTHER; note = 2'-O-methyl ribonucleotide
  modified_base 11: mod_base = OTHER; note = 2'-fluoro ribonucleotide
  modified_base 12..21: mod_base = OTHER; note = 2'-O-methyl ribonucleotide
  modified_base 1..3: mod_base = OTHER; note = phosphorothioate linkage
ctgacaggctacaggcaatca

SEQ ID NO: 647 - RNA, 21 nt, synthetic construct
  source 1..21: mol_type = other RNA
  modified_base 1..6: mod_base = OTHER; note = 2'-O-methyl ribonucleotide
  modified_base 7: mod_base = OTHER; note = 2'-fluoro ribonucleotide
  modified_base 8: mod_base = OTHER; note = 2'-O-methyl ribonucleotide
  modified_base 9: mod_base = OTHER; note = 2'-fluoro ribonucleotide
  modified_base 10: mod_base = OTHER; note = 2'-O-methyl ribonucleotide
  modified_base 11: mod_base = OTHER; note = 2'-fluoro ribonucleotide
  modified_base 12..21: mod_base = OTHER; note = 2'-O-methyl ribonucleotide
  modified_base 1..3: mod_base = OTHER; note = phosphorothioate linkage
gacaagaactgcacctcccga

SEQ ID NO: 648 - RNA, 21 nt, synthetic construct
  source 1..21: mol_type = other RNA
  modified_base 1..6: mod_base = OTHER; note = 2'-O-methyl ribonucleotide
  modified_base 7: mod_base = OTHER; note = 2'-fluoro ribonucleotide
  modified_base 8: mod_base = OTHER; note = 2'-O-methyl ribonucleotide
  modified_base 9: mod_base = OTHER; note = 2'-fluoro ribonucleotide
  modified_base 10: mod_base = OTHER; note = 2'-O-methyl ribonucleotide
  modified_base 11: mod_base = OTHER; note = 2'-fluoro ribonucleotide
  modified_base 12..21: mod_base = OTHER; note = 2'-O-methyl ribonucleotide
  modified_base 1..3: mod_base = OTHER; note = phosphorothioate linkage
cacctcccggctggatgcgca

SEQ ID NO: 649 - RNA, 21 nt, synthetic construct
  source 1..21: mol_type = other RNA
  modified_base 1..6: mod_base = OTHER; note = 2'-O-methyl ribonucleotide
  modified_base 7: mod_base = OTHER; note = 2'-fluoro ribonucleotide
  modified_base 8: mod_base = OTHER; note = 2'-O-methyl ribonucleotide
  modified_base 9: mod_base = OTHER; note = 2'-fluoro ribonucleotide
  modified_base 10: mod_base = OTHER; note = 2'-O-methyl ribonucleotide
  modified_base 11: mod_base = OTHER; note = 2'-fluoro ribonucleotide
  modified_base 12..21: mod_base = OTHER; note = 2'-O-methyl ribonucleotide
  modified_base 1..3: mod_base = OTHER; note = phosphorothioate linkage
tcccggctggatgcgcacaaa

SEQ ID NO: 650 - RNA, 21 nt, synthetic construct
  source 1..21: mol_type = other RNA
  modified_base 1..6: mod_base = OTHER; note = 2'-O-methyl ribonucleotide
  modified_base 7: mod_base = OTHER; note = 2'-fluoro ribonucleotide
  modified_base 8: mod_base = OTHER; note = 2'-O-methyl ribonucleotide
  modified_base 9: mod_base = OTHER; note = 2'-fluoro ribonucleotide
  modified_base 10: mod_base = OTHER; note = 2'-O-methyl ribonucleotide
  modified_base 11: mod_base = OTHER; note = 2'-fluoro ribonucleotide
  modified_base 12..21: mod_base = OTHER; note = 2'-O-methyl ribonucleotide
  modified_base 1..3: mod_base = OTHER; note = phosphorothioate linkage
cccggctggatgcgcacaaga

SEQ ID NO: 651 - RNA, 21 nt, synthetic construct
  source 1..21: mol_type = other RNA
  modified_base 1..6: mod_base = OTHER; note = 2'-O-methyl ribonucleotide
  modified_base 7: mod_base = OTHER; note = 2'-fluoro ribonucleotide
  modified_base 8: mod_base = OTHER; note = 2'-O-methyl ribonucleotide
  modified_base 9: mod_base = OTHER; note = 2'-fluoro ribonucleotide
  modified_base 10: mod_base = OTHER; note = 2'-O-methyl ribonucleotide
  modified_base 11: mod_base = OTHER; note = 2'-fluoro ribonucleotide
  modified_base 12..21: mod_base = OTHER; note = 2'-O-methyl ribonucleotide
  modified_base 1..3: mod_base = OTHER; note = phosphorothioate linkage
gctggatgcgcacaaggtcca

SEQ ID NO: 652 - RNA, 21 nt, synthetic construct
  source 1..21: mol_type = other RNA
  modified_base 1..6: mod_base = OTHER; note = 2'-O-methyl ribonucleotide
  modified_base 7: mod_base = OTHER; note = 2'-fluoro ribonucleotide
  modified_base 8: mod_base = OTHER; note = 2'-O-methyl ribonucleotide
  modified_base 9: mod_base = OTHER; note = 2'-fluoro ribonucleotide
  modified_base 10: mod_base = OTHER; note = 2'-O-methyl ribonucleotide
  modified_base 11: mod_base = OTHER; note = 2'-fluoro ribonucleotide
  modified_base 12..21: mod_base = OTHER; note = 2'-O-methyl ribonucleotide
  modified_base 1..3: mod_base = OTHER; note = phosphorothioate linkage
ctggatgcgcacaaggtccta

SEQ ID NO: 653 - RNA, 21 nt, synthetic construct
  source 1..21: mol_type = other RNA
  modified_base 1..6: mod_base = OTHER; note = 2'-O-methyl ribonucleotide
  modified_base 7: mod_base = OTHER; note = 2'-fluoro ribonucleotide
  modified_base 8: mod_base = OTHER; note = 2'-O-methyl ribonucleotide
  modified_base 9: mod_base = OTHER; note = 2'-fluoro ribonucleotide
  modified_base 10: mod_base = OTHER; note = 2'-O-methyl ribonucleotide
  modified_base 11: mod_base = OTHER; note = 2'-fluoro ribonucleotide
  modified_base 12..21: mod_base = OTHER; note = 2'-O-methyl ribonucleotide
  modified_base 1..3: mod_base = OTHER; note = phosphorothioate linkage
gcgcacaaggtcctgtctgca

SEQ ID NO: 654 - RNA, 21 nt, synthetic construct
  source 1..21: mol_type = other RNA
  modified_base 1..6: mod_base = OTHER; note = 2'-O-methyl ribonucleotide
  modified_base 7: mod_base = OTHER; note = 2'-fluoro ribonucleotide
  modified_base 8: mod_base = OTHER; note = 2'-O-methyl ribonucleotide
  modified_base 9: mod_base = OTHER; note = 2'-fluoro ribonucleotide
  modified_base 10: mod_base = OTHER; note = 2'-O-methyl ribonucleotide
  modified_base 11: mod_base = OTHER; note = 2'-fluoro ribonucleotide
  modified_base 12..21: mod_base = OTHER; note = 2'-O-methyl ribonucleotide
  modified_base 1..3: mod_base = OTHER; note = phosphorothioate linkage
cagccgtttgtgcagggccta

SEQ ID NO: 655 - RNA, 21 nt, synthetic construct
  source 1..21: mol_type = other RNA
  modified_base 1..6: mod_base = OTHER; note = 2'-O-methyl ribonucleotide
  modified_base 7: mod_base = OTHER; note = 2'-fluoro ribonucleotide
  modified_base 8: mod_base = OTHER; note = 2'-O-methyl ribonucleotide
  modified_base 9: mod_base = OTHER; note = 2'-fluoro ribonucleotide
  modified_base 10: mod_base = OTHER; note = 2'-O-methyl ribonucleotide
  modified_base 11: mod_base = OTHER; note = 2'-fluoro ribonucleotide
  modified_base 12..21: mod_base = OTHER; note = 2'-O-methyl ribonucleotide
  modified_base 1..3: mod_base = OTHER; note = phosphorothioate linkage
gcagggcctggctctctataa

SEQ ID NO: 656 - RNA, 21 nt, synthetic construct
  source 1..21: mol_type = other RNA
  modified_base 1..6: mod_base = OTHER; note = 2'-O-methyl ribonucleotide
  modified_base 7: mod_base = OTHER; note = 2'-fluoro ribonucleotide
  modified_base 8: mod_base = OTHER; note = 2'-O-methyl ribonucleotide
  modified_base 9: mod_base = OTHER; note = 2'-fluoro ribonucleotide
  modified_base 10: mod_base = OTHER; note = 2'-O-methyl ribonucleotide
  modified_base 11: mod_base = OTHER; note = 2'-fluoro ribonucleotide
  modified_base 12..21: mod_base = OTHER; note = 2'-O-methyl ribonucleotide
  modified_base 1..3: mod_base = OTHER; note = phosphorothioate linkage
ctggctctctatacccctgta

SEQ ID NO: 657 - RNA, 21 nt, synthetic construct
  source 1..21: mol_type = other RNA
  modified_base 1..6: mod_base = OTHER; note = 2'-O-methyl ribonucleotide
  modified_base 7: mod_base = OTHER; note = 2'-fluoro ribonucleotide
  modified_base 8: mod_base = OTHER; note = 2'-O-methyl ribonucleotide
  modified_base 9: mod_base = OTHER; note = 2'-fluoro ribonucleotide
  modified_base 10: mod_base = OTHER; note = 2'-O-methyl ribonucleotide
  modified_base 11: mod_base = OTHER; note = 2'-fluoro ribonucleotide
  modified_base 12..21: mod_base = OTHER; note = 2'-O-methyl ribonucleotide
  modified_base 1..3: mod_base = OTHER; note = phosphorothioate linkage
ggctctctatacccctgtgga

SEQ ID NO: 658 - RNA, 21 nt, synthetic construct
  source 1..21: mol_type = other RNA
  modified_base 1..6: mod_base = OTHER; note = 2'-O-methyl ribonucleotide
  modified_base 7: mod_base = OTHER; note = 2'-fluoro ribonucleotide
  modified_base 8: mod_base = OTHER; note = 2'-O-methyl ribonucleotide
  modified_base 9: mod_base = OTHER; note = 2'-fluoro ribonucleotide
  modified_base 10: mod_base = OTHER; note = 2'-O-methyl ribonucleotide
  modified_base 11: mod_base = OTHER; note = 2'-fluoro ribonucleotide
  modified_base 12..21: mod_base = OTHER; note = 2'-O-methyl ribonucleotide
  modified_base 1..3: mod_base = OTHER; note = phosphorothioate linkage
ctctctatacccctgtggtca

SEQ ID NO: 659 - RNA, 21 nt, synthetic construct
  source 1..21: mol_type = other RNA
  modified_base 1..6: mod_base = OTHER; note = 2'-O-methyl ribonucleotide
  modified_base 7: mod_base = OTHER; note = 2'-fluoro ribonucleotide
  modified_base 8: mod_base = OTHER; note = 2'-O-methyl ribonucleotide
  modified_base 9: mod_base = OTHER; note = 2'-fluoro ribonucleotide
  modified_base 10: mod_base = OTHER; note = 2'-O-methyl ribonucleotide
  modified_base 11: mod_base = OTHER; note = 2'-fluoro ribonucleotide
  modified_base 12..21: mod_base = OTHER; note = 2'-O-methyl ribonucleotide
  modified_base 1..3: mod_base = OTHER; note = phosphorothioate linkage
tctctatacccctgtggtcca

SEQ ID NO: 660 - RNA, 21 nt, synthetic construct
  source 1..21: mol_type = other RNA
  modified_base 1..6: mod_base = OTHER; note = 2'-O-methyl ribonucleotide
  modified_base 7: mod_base = OTHER; note = 2'-fluoro ribonucleotide
  modified_base 8: mod_base = OTHER; note = 2'-O-methyl ribonucleotide
  modified_base 9: mod_base = OTHER; note = 2'-fluoro ribonucleotide
  modified_base 10: mod_base = OTHER; note = 2'-O-methyl ribonucleotide
  modified_base 11: mod_base = OTHER; note = 2'-fluoro ribonucleotide
  modified_base 12..21: mod_base = OTHER; note = 2'-O-methyl ribonucleotide
  modified_base 1..3: mod_base = OTHER; note = phosphorothioate linkage
tctatacccctgtggtcctca

SEQ ID NO: 661 - RNA, 21 nt, synthetic construct
  source 1..21: mol_type = other RNA
  modified_base 1..6: mod_base = OTHER; note = 2'-O-methyl ribonucleotide
  modified_base 7: mod_base = OTHER; note = 2'-fluoro ribonucleotide
  modified_base 8: mod_base = OTHER; note = 2'-O-methyl ribonucleotide
  modified_base 9: mod_base = OTHER; note = 2'-fluoro ribonucleotide
  modified_base 10: mod_base = OTHER; note = 2'-O-methyl ribonucleotide
  modified_base 11: mod_base = OTHER; note = 2'-fluoro ribonucleotide
  modified_base 12..21: mod_base = OTHER; note = 2'-O-methyl ribonucleotide
  modified_base 1..3: mod_base = OTHER; note = phosphorothioate linkage
ctgtggtcctcccacgctcta

SEQ ID NO: 662 - RNA, 21 nt, synthetic construct
  source 1..21: mol_type = other RNA
  modified_base 1..6: mod_base = OTHER; note = 2'-O-methyl ribonucleotide
  modified_base 7: mod_base = OTHER; note = 2'-fluoro ribonucleotide
  modified_base 8: mod_base = OTHER; note = 2'-O-methyl ribonucleotide
  modified_base 9: mod_base = OTHER; note = 2'-fluoro ribonucleotide
  modified_base 10: mod_base = OTHER; note = 2'-O-methyl ribonucleotide
  modified_base 11: mod_base = OTHER; note = 2'-fluoro ribonucleotide
  modified_base 12..21: mod_base = OTHER; note = 2'-O-methyl ribonucleotide
  modified_base 1..3: mod_base = OTHER; note = phosphorothioate linkage
ccacgctctctggacttcaca

SEQ ID NO: 663 - RNA, 21 nt, synthetic construct
  source 1..21: mol_type = other RNA
  modified_base 1..6: mod_base = OTHER; note = 2'-O-methyl ribonucleotide
  modified_base 7: mod_base = OTHER; note = 2'-fluoro ribonucleotide
  modified_base 8: mod_base = OTHER; note = 2'-O-methyl ribonucleotide
  modified_base 9: mod_base = OTHER; note = 2'-fluoro ribonucleotide
  modified_base 10: mod_base = OTHER; note = 2'-O-methyl ribonucleotide
  modified_base 11: mod_base = OTHER; note = 2'-fluoro ribonucleotide
  modified_base 12..21: mod_base = OTHER; note = 2'-O-methyl ribonucleotide
  modified_base 1..3: mod_base = OTHER; note = phosphorothioate linkage
ctctctggacttcacagaaca

SEQ ID NO: 664 - RNA, 21 nt, synthetic construct
  source 1..21: mol_type = other RNA
  modified_base 1..6: mod_base = OTHER; note = 2'-O-methyl ribonucleotide
  modified_base 7: mod_base = OTHER; note = 2'-fluoro ribonucleotide
  modified_base 8: mod_base = OTHER; note = 2'-O-methyl ribonucleotide
  modified_base 9: mod_base = OTHER; note = 2'-fluoro ribonucleotide
  modified_base 10: mod_base = OTHER; note = 2'-O-methyl ribonucleotide
  modified_base 11: mod_base = OTHER; note = 2'-fluoro ribonucleotide
  modified_base 12..21: mod_base = OTHER; note = 2'-O-methyl ribonucleotide
  modified_base 1..3: mod_base = OTHER; note = phosphorothioate linkage
tgagaagattgacaggttcaa

SEQ ID NO: 665 - RNA, 21 nt, synthetic construct
  source 1..21: mol_type = other RNA
  modified_base 1..6: mod_base = OTHER; note = 2'-O-methyl ribonucleotide
  modified_base 7: mod_base = OTHER; note = 2'-fluoro ribonucleotide
  modified_base 8: mod_base = OTHER; note = 2'-O-methyl ribonucleotide
  modified_base 9: mod_base = OTHER; note = 2'-fluoro ribonucleotide
  modified_base 10: mod_base = OTHER; note = 2'-O-methyl ribonucleotide
  modified_base 11: mod_base = OTHER; note = 2'-fluoro ribonucleotide
  modified_base 12..21: mod_base = OTHER; note = 2'-O-methyl ribonucleotide
  modified_base 1..3: mod_base = OTHER; note = phosphorothioate linkage
gacaggttcatgcaggctgta

SEQ ID NO: 666 - RNA, 21 nt, synthetic construct
  source 1..21: mol_type = other RNA
  modified_base 1..6: mod_base = OTHER; note = 2'-O-methyl ribonucleotide
  modified_base 7: mod_base = OTHER; note = 2'-fluoro ribonucleotide
  modified_base 8: mod_base = OTHER; note = 2'-O-methyl ribonucleotide
  modified_base 9: mod_base = OTHER; note = 2'-fluoro ribonucleotide
  modified_base 10: mod_base = OTHER; note = 2'-O-methyl ribonucleotide
  modified_base 11: mod_base = OTHER; note = 2'-fluoro ribonucleotide
  modified_base 12..21: mod_base = OTHER; note = 2'-O-methyl ribonucleotide
  modified_base 1..3: mod_base = OTHER; note = phosphorothioate linkage
gacagcaccctggctttcaaa

SEQ ID NO: 667 - RNA, 21 nt, synthetic construct
  source 1..21: mol_type = other RNA
  modified_base 1..6: mod_base = OTHER; note = 2'-O-methyl ribonucleotide
  modified_base 7: mod_base = OTHER; note = 2'-fluoro ribonucleotide
  modified_base 8: mod_base = OTHER; note = 2'-O-methyl ribonucleotide
  modified_base 9: mod_base = OTHER; note = 2'-fluoro ribonucleotide
  modified_base 10: mod_base = OTHER; note = 2'-O-methyl ribonucleotide
  modified_base 11: mod_base = OTHER; note = 2'-fluoro ribonucleotide
  modified_base 12..21: mod_base = OTHER; note = 2'-O-methyl ribonucleotide
  modified_base 1..3: mod_base = OTHER; note = phosphorothioate linkage
accctggctttcaacacctaa

SEQ ID NO: 668 - RNA, 21 nt, synthetic construct
  source 1..21: mol_type = other RNA
  modified_base 1..6: mod_base = OTHER; note = 2'-O-methyl ribonucleotide
  modified_base 7: mod_base = OTHER; note = 2'-fluoro ribonucleotide
  modified_base 8: mod_base = OTHER; note = 2'-O-methyl ribonucleotide
  modified_base 9: mod_base = OTHER; note = 2'-fluoro ribonucleotide
  modified_base 10: mod_base = OTHER; note = 2'-O-methyl ribonucleotide
  modified_base 11: mod_base = OTHER; note = 2'-fluoro ribonucleotide
  modified_base 12..21: mod_base = OTHER; note = 2'-O-methyl ribonucleotide
  modified_base 1..3: mod_base = OTHER; note = phosphorothioate linkage
tggctttcaacacctacgtca

SEQ ID NO: 669 - RNA, 21 nt, synthetic construct
  source 1..21: mol_type = other RNA
  modified_base 1..6: mod_base = OTHER; note = 2'-O-methyl ribonucleotide
  modified_base 7: mod_base = OTHER; note = 2'-fluoro ribonucleotide
  modified_base 8: mod_base = OTHER; note = 2'-O-methyl ribonucleotide
  modified_base 9: mod_base = OTHER; note = 2'-fluoro ribonucleotide
  modified_base 10: mod_base = OTHER; note = 2'-O-methyl ribonucleotide
  modified_base 11: mod_base = OTHER; note = 2'-fluoro ribonucleotide
  modified_base 12..21: mod_base = OTHER; note = 2'-O-methyl ribonucleotide
  modified_base 1..3: mod_base = OTHER; note = phosphorothioate linkage
ggctttcaacacctacgtcca

SEQ ID NO: 670 - RNA, 21 nt, synthetic construct
  source 1..21: mol_type = other RNA
  modified_base 1..6: mod_base = OTHER; note = 2'-O-methyl ribonucleotide
  modified_base 7: mod_base = OTHER; note = 2'-fluoro ribonucleotide
  modified_base 8: mod_base = OTHER; note = 2'-O-methyl ribonucleotide
  modified_base 9: mod_base = OTHER; note = 2'-fluoro ribonucleotide
  modified_base 10: mod_base = OTHER; note = 2'-O-methyl ribonucleotide
  modified_base 11: mod_base = OTHER; note = 2'-fluoro ribonucleotide
  modified_base 12..21: mod_base = OTHER; note = 2'-O-methyl ribonucleotide
  modified_base 1..3: mod_base = OTHER; note = phosphorothioate linkage
gctttcaacacctacgtccaa

SEQ ID NO: 671 - RNA, 21 nt, synthetic construct
  source 1..21: mol_type = other RNA
  modified_base 1..6: mod_base = OTHER; note = 2'-O-methyl ribonucleotide
  modified_base 7: mod_base = OTHER; note = 2'-fluoro ribonucleotide
  modified_base 8: mod_base = OTHER; note = 2'-O-methyl ribonucleotide
  modified_base 9: mod_base = OTHER; note = 2'-fluoro ribonucleotide
  modified_base 10: mod_base = OTHER; note = 2'-O-methyl ribonucleotide
  modified_base 11: mod_base = OTHER; note = 2'-fluoro ribonucleotide
  modified_base 12..21: mod_base = OTHER; note = 2'-O-methyl ribonucleotide
  modified_base 1..3: mod_base = OTHER; note = phosphorothioate linkage
tttcaacacctacgtccacta

SEQ ID NO: 672 - RNA, 21 nt, synthetic construct
  source 1..21: mol_type = other RNA
  modified_base 1..6: mod_base = OTHER; note = 2'-O-methyl ribonucleotide
  modified_base 7: mod_base = OTHER; note = 2'-fluoro ribonucleotide
  modified_base 8: mod_base = OTHER; note = 2'-O-methyl ribonucleotide
  modified_base 9: mod_base = OTHER; note = 2'-fluoro ribonucleotide
  modified_base 10: mod_base = OTHER; note = 2'-O-methyl ribonucleotide
  modified_base 11: mod_base = OTHER; note = 2'-fluoro ribonucleotide
  modified_base 12..21: mod_base = OTHER; note = 2'-O-methyl ribonucleotide
  modified_base 1..3: mod_base = OTHER; note = phosphorothioate linkage
tcaacacctacgtccacttca

SEQ ID NO: 673 - RNA, 21 nt, synthetic construct
  source 1..21: mol_type = other RNA
  modified_base 1..6: mod_base = OTHER; note = 2'-O-methyl ribonucleotide
  modified_base 7: mod_base = OTHER; note = 2'-fluoro ribonucleotide
  modified_base 8: mod_base = OTHER; note = 2'-O-methyl ribonucleotide
  modified_base 9: mod_base = OTHER; note = 2'-fluoro ribonucleotide
  modified_base 10: mod_base = OTHER; note = 2'-O-methyl ribonucleotide
  modified_base 11: mod_base = OTHER; note = 2'-fluoro ribonucleotide
  modified_base 12..21: mod_base = OTHER; note = 2'-O-methyl ribonucleotide
  modified_base 1..3: mod_base = OTHER; note = phosphorothioate linkage
caacacctacgtccacttcca

SEQ ID NO: 674 - RNA, 21 nt, synthetic construct
  source 1..21: mol_type = other RNA
  modified_base 1..6: mod_base = OTHER; note = 2'-O-methyl ribonucleotide
  modified_base 7: mod_base = OTHER; note = 2'-fluoro ribonucleotide
  modified_base 8: mod_base = OTHER; note = 2'-O-methyl ribonucleotide
  modified_base 9: mod_base = OTHER; note = 2'-fluoro ribonucleotide
  modified_base 10: mod_base = OTHER; note = 2'-O-methyl ribonucleotide
  modified_base 11: mod_base = OTHER; note = 2'-fluoro ribonucleotide
  modified_base 12..21: mod_base = OTHER; note = 2'-O-methyl ribonucleotide
  modified_base 1..3: mod_base = OTHER; note = phosphorothioate linkage
aacacctacgtccacttccaa

SEQ ID NO: 675 - RNA, 21 nt, synthetic construct
  source 1..21: mol_type = other RNA
  modified_base 1..6: mod_base = OTHER; note = 2'-O-methyl ribonucleotide
  modified_base 7: mod_base = OTHER; note = 2'-fluoro ribonucleotide
  modified_base 8: mod_base = OTHER; note = 2'-O-methyl ribonucleotide
  modified_base 9: mod_base = OTHER; note = 2'-fluoro ribonucleotide
  modified_base 10: mod_base = OTHER; note = 2'-O-methyl ribonucleotide
  modified_base 11: mod_base = OTHER; note = 2'-fluoro ribonucleotide
  modified_base 12..21: mod_base = OTHER; note = 2'-O-methyl ribonucleotide
  modified_base 1..3: mod_base = OTHER; note = phosphorothioate linkage
tacgtccacttccaagggaaa

SEQ ID NO: 676 - RNA, 21 nt, synthetic construct
  source 1..21: mol_type = other RNA
  modified_base 1..6: mod_base = OTHER; note = 2'-O-methyl ribonucleotide
  modified_base 7: mod_base = OTHER; note = 2'-fluoro ribonucleotide
  modified_base 8: mod_base = OTHER; note = 2'-O-methyl ribonucleotide
  modified_base 9: mod_base = OTHER; note = 2'-fluoro ribonucleotide
  modified_base 10: mod_base = OTHER; note = 2'-O-methyl ribonucleotide
  modified_base 11: mod_base = OTHER; note = 2'-fluoro ribonucleotide
  modified_base 12..21: mod_base = OTHER; note = 2'-O-methyl ribonucleotide
  modified_base 1..3: mod_base = OTHER; note = phosphorothioate linkage
ttctgggtggacaacagcaca

SEQ ID NO: 677 - RNA, 21 nt, synthetic construct
  source 1..21: mol_type = other RNA
  modified_base 1..6: mod_base = OTHER; note = 2'-O-methyl ribonucleotide
  modified_base 7: mod_base = OTHER; note = 2'-fluoro ribonucleotide
  modified_base 8: mod_base = OTHER; note = 2'-O-methyl ribonucleotide
  modified_base 9: mod_base = OTHER; note = 2'-fluoro ribonucleotide
  modified_base 10: mod_base = OTHER; note = 2'-O-methyl ribonucleotide
  modified_base 11: mod_base = OTHER; note = 2'-fluoro ribonucleotide
  modified_base 12..21: mod_base = OTHER; note = 2'-O-methyl ribonucleotide
  modified_base 1..3: mod_base = OTHER; note = phosphorothioate linkage
acaacttctcggtgactcaaa

SEQ ID NO: 678 - RNA, 21 nt, synthetic construct
  source 1..21: mol_type = other RNA
  modified_base 1..6: mod_base = OTHER; note = 2'-O-methyl ribonucleotide
  modified_base 7: mod_base = OTHER; note = 2'-fluoro ribonucleotide
  modified_base 8: mod_base = OTHER; note = 2'-O-methyl ribonucleotide
  modified_base 9: mod_base = OTHER; note = 2'-fluoro ribonucleotide
  modified_base 10: mod_base = OTHER; note = 2'-O-methyl ribonucleotide
  modified_base 11: mod_base = OTHER; note = 2'-fluoro ribonucleotide
  modified_base 12..21: mod_base = OTHER; note = 2'-O-methyl ribonucleotide
  modified_base 1..3: mod_base = OTHER; note = phosphorothioate linkage
caacttctcggtgactcaaga

SEQ ID NO: 679 - RNA, 21 nt, synthetic construct
  source 1..21: mol_type = other RNA
  modified_base 1..6: mod_base = OTHER; note = 2'-O-methyl ribonucleotide
  modified_base 7: mod_base = OTHER; note = 2'-fluoro ribonucleotide
  modified_base 8: mod_base = OTHER; note = 2'-O-methyl ribonucleotide
  modified_base 9: mod_base = OTHER; note = 2'-fluoro ribonucleotide
  modified_base 10: mod_base = OTHER; note = 2'-O-methyl ribonucleotide
  modified_base 11: mod_base = OTHER; note = 2'-fluoro ribonucleotide
  modified_base 12..21: mod_base = OTHER; note = 2'-O-methyl ribonucleotide
  modified_base 1..3: mod_base = OTHER; note = phosphorothioate linkage
aacttctcggtgactcaagta

SEQ ID NO: 680 - RNA, 21 nt, synthetic construct
  source 1..21: mol_type = other RNA
  modified_base 1..6: mod_base = OTHER; note = 2'-O-methyl ribonucleotide
  modified_base 7: mod_base = OTHER; note = 2'-fluoro ribonucleotide
  modified_base 8: mod_base = OTHER; note = 2'-O-methyl ribonucleotide
  modified_base 9: mod_base = OTHER; note = 2'-fluoro ribonucleotide
  modified_base 10: mod_base = OTHER; note = 2'-O-methyl ribonucleotide
  modified_base 11: mod_base = OTHER; note = 2'-fluoro ribonucleotide
  modified_base 12..21: mod_base = OTHER; note = 2'-O-methyl ribonucleotide
  modified_base 1..3: mod_base = OTHER; note = phosphorothioate linkage
acttctcggtgactcaagtga

SEQ ID NO: 681 - RNA, 21 nt, synthetic construct
  source 1..21: mol_type = other RNA
  modified_base 1..6: mod_base = OTHER; note = 2'-O-methyl ribonucleotide
  modified_base 7: mod_base = OTHER; note = 2'-fluoro ribonucleotide
  modified_base 8: mod_base = OTHER; note = 2'-O-methyl ribonucleotide
  modified_base 9: mod_base = OTHER; note = 2'-fluoro ribonucleotide
  modified_base 10: mod_base = OTHER; note = 2'-O-methyl ribonucleotide
  modified_base 11: mod_base = OTHER; note = 2'-fluoro ribonucleotide
  modified_base 12..21: mod_base = OTHER; note = 2'-O-methyl ribonucleotide
  modified_base 1..3: mod_base = OTHER; note = phosphorothioate linkage
cttctcggtgactcaagtgca

SEQ ID NO: 682 - RNA, 21 nt, synthetic construct
  source 1..21: mol_type = other RNA
  modified_base 1..6: mod_base = OTHER; note = 2'-O-methyl ribonucleotide
  modified_base 7: mod_base = OTHER; note = 2'-fluoro ribonucleotide
  modified_base 8: mod_base = OTHER; note = 2'-O-methyl ribonucleotide
  modified_base 9: mod_base = OTHER; note = 2'-fluoro ribonucleotide
  modified_base 10: mod_base = OTHER; note = 2'-O-methyl ribonucleotide
  modified_base 11: mod_base = OTHER; note = 2'-fluoro ribonucleotide
  modified_base 12..21: mod_base = OTHER; note = 2'-O-methyl ribonucleotide
  modified_base 1..3: mod_base = OTHER; note = phosphorothioate linkage
tctcggtgactcaagtgccca

SEQ ID NO: 683 - RNA, 21 nt, synthetic construct
  source 1..21: mol_type = other RNA
  modified_base 1..6: mod_base = OTHER; note = 2'-O-methyl ribonucleotide
  modified_base 7: mod_base = OTHER; note = 2'-fluoro ribonucleotide
  modified_base 8: mod_base = OTHER; note = 2'-O-methyl ribonucleotide
  modified_base 9: mod_base = OTHER; note = 2'-fluoro ribonucleotide
  modified_base 10: mod_base = OTHER; note = 2'-O-methyl ribonucleotide
  modified_base 11: mod_base = OTHER; note = 2'-fluoro ribonucleotide
  modified_base 12..21: mod_base = OTHER; note = 2'-O-methyl ribonucleotide
  modified_base 1..3: mod_base = OTHER; note = phosphorothioate linkage
ctcggtgactcaagtgcccta

SEQ ID NO: 684 - RNA, 21 nt, synthetic construct
  source 1..21: mol_type = other RNA
  modified_base 1..6: mod_base = OTHER; note = 2'-O-methyl ribonucleotide
  modified_base 7: mod_base = OTHER; note = 2'-fluoro ribonucleotide
  modified_base 8: mod_base = OTHER; note = 2'-O-methyl ribonucleotide
  modified_base 9: mod_base = OTHER; note = 2'-fluoro ribonucleotide
  modified_base 10: mod_base = OTHER; note = 2'-O-methyl ribonucleotide
  modified_base 11: mod_base = OTHER; note = 2'-fluoro ribonucleotide
  modified_base 12..21: mod_base = OTHER; note = 2'-O-methyl ribonucleotide
  modified_base 1..3: mod_base = OTHER; note = phosphorothioate linkage
cggtgactcaagtgcccttca

SEQ ID NO: 685 - RNA, 21 nt, synthetic construct
  source 1..21: mol_type = other RNA
  modified_base 1..6: mod_base = OTHER; note = 2'-O-methyl ribonucleotide
  modified_base 7: mod_base = OTHER; note = 2'-fluoro ribonucleotide
  modified_base 8: mod_base = OTHER; note = 2'-O-methyl ribonucleotide
  modified_base 9: mod_base = OTHER; note = 2'-fluoro ribonucleotide
  modified_base 10: mod_base = OTHER; note = 2'-O-methyl ribonucleotide
  modified_base 11: mod_base = OTHER; note = 2'-fluoro ribonucleotide
  modified_base 12..21: mod_base = OTHER; note = 2'-O-methyl ribonucleotide
  modified_base 1..3: mod_base = OTHER; note = phosphorothioate linkage
ccttcactgagagcgcctgca

SEQ ID NO: 686 - RNA, 21 nt, synthetic construct
  source 1..21: mol_type = other RNA
  modified_base 1..6: mod_base = OTHER; note = 2'-O-methyl ribonucleotide
  modified_base 7: mod_base = OTHER; note = 2'-fluoro ribonucleotide
  modified_base 8: mod_base = OTHER; note = 2'-O-methyl ribonucleotide
  modified_base 9: mod_base = OTHER; note = 2'-fluoro ribonucleotide
  modified_base 10: mod_base = OTHER; note = 2'-O-methyl ribonucleotide
  modified_base 11: mod_base = OTHER; note = 2'-fluoro ribonucleotide
  modified_base 12..21: mod_base = OTHER; note = 2'-O-methyl ribonucleotide
  modified_base 1..3: mod_base = OTHER; note = phosphorothioate linkage
tgctgctgatccagcctcaca

SEQ ID NO: 687 - RNA, 21 nt, synthetic construct
  source 1..21: mol_type = other RNA
  modified_base 1..6: mod_base = OTHER; note = 2'-O-methyl ribonucleotide
  modified_base 7: mod_base = OTHER; note = 2'-fluoro ribonucleotide
  modified_base 8: mod_base = OTHER; note = 2'-O-methyl ribonucleotide
  modified_base 9: mod_base = OTHER; note = 2'-fluoro ribonucleotide
  modified_base 10: mod_base = OTHER; note = 2'-O-methyl ribonucleotide
  modified_base 11: mod_base = OTHER; note = 2'-fluoro ribonucleotide
  modified_base 12..21: mod_base = OTHER; note = 2'-O-methyl ribonucleotide
  modified_base 1..3: mod_base = OTHER; note = phosphorothioate linkage
ccagcaaaactccctcaacta

SEQ ID NO: 688 - RNA, 21 nt, synthetic construct
  source 1..21: mol_type = other RNA
  modified_base 1..6: mod_base = OTHER; note = 2'-O-methyl ribonucleotide
  modified_base 7: mod_base = OTHER; note = 2'-fluoro ribonucleotide
  modified_base 8: mod_base = OTHER; note = 2'-O-methyl ribonucleotide
  modified_base 9: mod_base = OTHER; note = 2'-fluoro ribonucleotide
  modified_base 10: mod_base = OTHER; note = 2'-O-methyl ribonucleotide
  modified_base 11: mod_base = OTHER; note = 2'-fluoro ribonucleotide
  modified_base 12..21: mod_base = OTHER; note = 2'-O-methyl ribonucleotide
  modified_base 1..3: mod_base = OTHER; note = phosphorothioate linkage
cagcaaaactccctcaactga

SEQ ID NO: 689 - RNA, 21 nt, synthetic construct
  source 1..21: mol_type = other RNA
  modified_base 1..6: mod_base = OTHER; note = 2'-O-methyl ribonucleotide
  modified_base 7: mod_base = OTHER; note = 2'-fluoro ribonucleotide
  modified_base 8: mod_base = OTHER; note = 2'-O-methyl ribonucleotide
  modified_base 9: mod_base = OTHER; note = 2'-fluoro ribonucleotide
  modified_base 10: mod_base = OTHER; note = 2'-O-methyl ribonucleotide
  modified_base 11: mod_base = OTHER; note = 2'-fluoro ribonucleotide
  modified_base 12..21: mod_base = OTHER; note = 2'-O-methyl ribonucleotide
  modified_base 1..3: mod_base = OTHER; note = phosphorothioate linkage
agcaaaactccctcaactgga

SEQ ID NO: 690 - RNA, 21 nt, synthetic construct
  source 1..21: mol_type = other RNA
  modified_base 1..6: mod_base = OTHER; note = 2'-O-methyl ribonucleotide
  modified_base 7: mod_base = OTHER; note = 2'-fluoro ribonucleotide
  modified_base 8: mod_base = OTHER; note = 2'-O-methyl ribonucleotide
  modified_base 9: mod_base = OTHER; note = 2'-fluoro ribonucleotide
  modified_base 10: mod_base = OTHER; note = 2'-O-methyl ribonucleotide
  modified_base 11: mod_base = OTHER; note = 2'-fluoro ribonucleotide
  modified_base 12..21: mod_base = OTHER; note = 2'-O-methyl ribonucleotide
  modified_base 1..3: mod_base = OTHER; note = phosphorothioate linkage
accatccacctgaccatgcca

SEQ ID NO: 691 - RNA, 21 nt, synthetic construct
  source 1..21: mol_type = other RNA
  modified_base 1..6: mod_base = OTHER; note = 2'-O-methyl ribonucleotide
  modified_base 7: mod_base = OTHER; note = 2'-fluoro ribonucleotide
  modified_base 8: mod_base = OTHER; note = 2'-O-methyl ribonucleotide
  modified_base 9: mod_base = OTHER; note = 2'-fluoro ribonucleotide
  modified_base 10: mod_base = OTHER; note = 2'-O-methyl ribonucleotide
  modified_base 11: mod_base = OTHER; note = 2'-fluoro ribonucleotide
  modified_base 12..21: mod_base = OTHER; note = 2'-O-methyl ribonucleotide
  modified_base 1..3: mod_base = OTHER; note = phosphorothioate linkage
acctgaccatgccccaactga

SEQ ID NO: 692 - RNA, 21 nt, synthetic construct
  source 1..21: mol_type = other RNA
  modified_base 1..6: mod_base = OTHER; note = 2'-O-methyl ribonucleotide
  modified_base 7: mod_base = OTHER; note = 2'-fluoro ribonucleotide
  modified_base 8: mod_base = OTHER; note = 2'-O-methyl ribonucleotide
  modified_base 9: mod_base = OTHER; note = 2'-fluoro ribonucleotide
  modified_base 10: mod_base = OTHER; note = 2'-O-methyl ribonucleotide
  modified_base 11: mod_base = OTHER; note = 2'-fluoro ribonucleotide
  modified_base 12..21: mod_base = OTHER; note = 2'-O-methyl ribonucleotide
  modified_base 1..3: mod_base = OTHER; note = phosphorothioate linkage
cccgccattctgcacaccgaa

SEQ ID NO: 693 - RNA, 21 nt, synthetic construct
  source 1..21: mol_type = other RNA
  modified_base 1..6: mod_base = OTHER; note = 2'-O-methyl ribonucleotide
  modified_base 7: mod_base = OTHER; note = 2'-fluoro ribonucleotide
  modified_base 8: mod_base = OTHER; note = 2'-O-methyl ribonucleotide
  modified_base 9: mod_base = OTHER; note = 2'-fluoro ribonucleotide
  modified_base 10: mod_base = OTHER; note = 2'-O-methyl ribonucleotide
  modified_base 11: mod_base = OTHER; note = 2'-fluoro ribonucleotide
  modified_base 12..21: mod_base = OTHER; note = 2'-O-methyl ribonucleotide
  modified_base 1..3: mod_base = OTHER; note = phosphorothioate linkage
acaccgagctgaacctgcaaa

SEQ ID NO: 694 - RNA, 21 nt, synthetic construct
  source 1..21: mol_type = other RNA
  modified_base 1..6: mod_base = OTHER; note = 2'-O-methyl ribonucleotide
  modified_base 7: mod_base = OTHER; note = 2'-fluoro ribonucleotide
  modified_base 8: mod_base = OTHER; note = 2'-O-methyl ribonucleotide
  modified_base 9: mod_base = OTHER; note = 2'-fluoro ribonucleotide
  modified_base 10: mod_base = OTHER; note = 2'-O-methyl ribonucleotide
  modified_base 11: mod_base = OTHER; note = 2'-fluoro ribonucleotide
  modified_base 12..21: mod_base = OTHER; note = 2'-O-methyl ribonucleotide
  modified_base 1..3: mod_base = OTHER; note = phosphorothioate linkage
cgagctgaacctgcaaaaata

SEQ ID NO: 695 - RNA, 21 nt, synthetic construct
  source 1..21: mol_type = other RNA
  modified_base 1..6: mod_base = OTHER; note = 2'-O-methyl ribonucleotide
  modified_base 7: mod_base = OTHER; note = 2'-fluoro ribonucleotide
  modified_base 8: mod_base = OTHER; note = 2'-O-methyl ribonucleotide
  modified_base 9: mod_base = OTHER; note = 2'-fluoro ribonucleotide
  modified_base 10: mod_base = OTHER; note = 2'-O-methyl ribonucleotide
  modified_base 11: mod_base = OTHER; note = 2'-fluoro ribonucleotide
  modified_base 12..21: mod_base = OTHER; note = 2'-O-methyl ribonucleotide
  modified_base 1..3: mod_base = OTHER; note = phosphorothioate linkage
gctgaacctgcaaaaattgaa

SEQ ID NO: 696 - RNA, 21 nt, synthetic construct
  source 1..21: mol_type = other RNA
  modified_base 1..6: mod_base = OTHER; note = 2'-O-methyl ribonucleotide
  modified_base 7: mod_base = OTHER; note = 2'-fluoro ribonucleotide
  modified_base 8: mod_base = OTHER; note = 2'-O-methyl ribonucleotide
  modified_base 9: mod_base = OTHER; note = 2'-fluoro ribonucleotide
  modified_base 10: mod_base = OTHER; note = 2'-O-methyl ribonucleotide
  modified_base 11: mod_base = OTHER; note = 2'-fluoro ribonucleotide
  modified_base 12..21: mod_base = OTHER; note = 2'-O-methyl ribonucleotide
  modified_base 1..3: mod_base = OTHER; note = phosphorothioate linkage
aaaattgagcaatgaccgcaa

SEQ ID NO: 697 - RNA, 21 nt, synthetic construct
  source 1..21: mol_type = other RNA
  modified_base 1..6: mod_base = OTHER; note = 2'-O-methyl ribonucleotide
  modified_base 7: mod_base = OTHER; note = 2'-fluoro ribonucleotide
  modified_base 8: mod_base = OTHER; note = 2'-O-methyl ribonucleotide
  modified_base 9: mod_base = OTHER; note = 2'-fluoro ribonucleotide
  modified_base 10: mod_base = OTHER; note = 2'-O-methyl ribonucleotide
  modified_base 11: mod_base = OTHER; note = 2'-fluoro ribonucleotide
  modified_base 12..21: mod_base = OTHER; note = 2'-O-methyl ribonucleotide
  modified_base 1..3: mod_base = OTHER; note = phosphorothioate linkage
gagcccacagagtctacccaa

SEQ ID NO: 698 - RNA, 21 nt, synthetic construct
  source 1..21: mol_type = other RNA
  modified_base 1..6: mod_base = OTHER; note = 2'-O-methyl ribonucleotide
  modified_base 7: mod_base = OTHER; note = 2'-fluoro ribonucleotide
  modified_base 8: mod_base = OTHER; note = 2'-O-methyl ribonucleotide
  modified_base 9: mod_base = OTHER; note = 2'-fluoro ribonucleotide
  modified_base 10: mod_base = OTHER; note = 2'-O-methyl ribonucleotide
  modified_base 11: mod_base = OTHER; note = 2'-fluoro ribonucleotide
  modified_base 12..21: mod_base = OTHER; note = 2'-O-methyl ribonucleotide
  modified_base 1..3: mod_base = OTHER; note = phosphorothioate linkage
agcccacagagtctacccaaa

SEQ ID NO: 699 - RNA, 21 nt, synthetic construct
  source 1..21: mol_type = other RNA
  modified_base 1..6: mod_base = OTHER; note = 2'-O-methyl ribonucleotide
  modified_base 7: mod_base = OTHER; note = 2'-fluoro ribonucleotide
  modified_base 8: mod_base = OTHER; note = 2'-O-methyl ribonucleotide
  modified_base 9: mod_base = OTHER; note = 2'-fluoro ribonucleotide
  modified_base 10: mod_base = OTHER; note = 2'-O-methyl ribonucleotide
  modified_base 11: mod_base = OTHER; note = 2'-fluoro ribonucleotide
  modified_base 12..21: mod_base = OTHER; note = 2'-O-methyl ribonucleotide
  modified_base 1..3: mod_base = OTHER; note = phosphorothioate linkage
cacagagtctacccaacagca

SEQ ID NO: 700 - RNA, 21 nt, synthetic construct
  source 1..21: mol_type = other RNA
  modified_base 1..6: mod_base = OTHER; note = 2'-O-methyl ribonucleotide
  modified_base 7: mod_base = OTHER; note = 2'-fluoro ribonucleotide
  modified_base 8: mod_base = OTHER; note = 2'-O-methyl ribonucleotide
  modified_base 9: mod_base = OTHER; note = 2'-fluoro ribonucleotide
  modified_base 10: mod_base = OTHER; note = 2'-O-methyl ribonucleotide
  modified_base 11: mod_base = OTHER; note = 2'-fluoro ribonucleotide
  modified_base 12..21: mod_base = OTHER; note = 2'-O-methyl ribonucleotide
  modified_base 1..3: mod_base = OTHER; note = phosphorothioate linkage
gaggtgaccctgaaccgccca

SEQ ID NO: 701 - RNA, 21 nt, synthetic construct
  source 1..21: mol_type = other RNA
  modified_base 1..6: mod_base = OTHER; note = 2'-O-methyl ribonucleotide
  modified_base 7: mod_base = OTHER; note = 2'-fluoro ribonucleotide
  modified_base 8: mod_base = OTHER; note = 2'-O-methyl ribonucleotide
  modified_base 9: mod_base = OTHER; note = 2'-fluoro ribonucleotide
  modified_base 10: mod_base = OTHER; note = 2'-O-methyl ribonucleotide
  modified_base 11: mod_base = OTHER; note = 2'-fluoro ribonucleotide
  modified_base 12..21: mod_base = OTHER; note = 2'-O-methyl ribonucleotide
  modified_base 1..3: mod_base = OTHER; note = phosphorothioate linkage
ggtgaccctgaaccgcccata

SEQ ID NO: 702 - RNA, 21 nt, synthetic construct
  source 1..21: mol_type = other RNA
  modified_base 1..6: mod_base = OTHER; note = 2'-O-methyl ribonucleotide
  modified_base 7: mod_base = OTHER; note = 2'-fluoro ribonucleotide
  modified_base 8: mod_base = OTHER; note = 2'-O-methyl ribonucleotide
  modified_base 9: mod_base = OTHER; note = 2'-fluoro ribonucleotide
  modified_base 10: mod_base = OTHER; note = 2'-O-methyl ribonucleotide
  modified_base 11: mod_base = OTHER; note = 2'-fluoro ribonucleotide
  modified_base 12..21: mod_base = OTHER; note = 2'-O-methyl ribonucleotide
  modified_base 1..3: mod_base = OTHER; note = phosphorothioate linkage
gtgaccctgaaccgcccatta

SEQ ID NO: 703 - RNA, 21 nt, synthetic construct
  source 1..21: mol_type = other RNA
  modified_base 1..6: mod_base = OTHER; note = 2'-O-methyl ribonucleotide
  modified_base 7: mod_base = OTHER; note = 2'-fluoro ribonucleotide
  modified_base 8: mod_base = OTHER; note = 2'-O-methyl ribonucleotide
  modified_base 9: mod_base = OTHER; note = 2'-fluoro ribonucleotide
  modified_base 10: mod_base = OTHER; note = 2'-O-methyl ribonucleotide
  modified_base 11: mod_base = OTHER; note = 2'-fluoro ribonucleotide
  modified_base 12..21: mod_base = OTHER; note = 2'-O-methyl ribonucleotide
  modified_base 1..3: mod_base = OTHER; note = phosphorothioate linkage
cctgaaccgcccattcctgta

SEQ ID NO: 704 - RNA, 21 nt, synthetic construct
  source 1..21: mol_type = other RNA
  modified_base 1..6: mod_base = OTHER; note = 2'-O-methyl ribonucleotide
  modified_base 7: mod_base = OTHER; note = 2'-fluoro ribonucleotide
  modified_base 8: mod_base = OTHER; note = 2'-O-methyl ribonucleotide
  modified_base 9: mod_base = OTHER; note = 2'-fluoro ribonucleotide
  modified_base 10: mod_base = OTHER; note = 2'-O-methyl ribonucleotide
  modified_base 11: mod_base = OTHER; note = 2'-fluoro ribonucleotide
  modified_base 12..21: mod_base = OTHER; note = 2'-O-methyl ribonucleotide
  modified_base 1..3: mod_base = OTHER; note = phosphorothioate linkage
ctgaaccgcccattcctgtta

SEQ ID NO: 705 - RNA, 21 nt, synthetic construct
  source 1..21: mol_type = other RNA
  modified_base 1..6: mod_base = OTHER; note = 2'-O-methyl ribonucleotide
  modified_base 7: mod_base = OTHER; note = 2'-fluoro ribonucleotide
  modified_base 8: mod_base = OTHER; note = 2'-O-methyl ribonucleotide
  modified_base 9: mod_base = OTHER; note = 2'-fluoro ribonucleotide
  modified_base 10: mod_base = OTHER; note = 2'-O-methyl ribonucleotide
  modified_base 11: mod_base = OTHER; note = 2'-fluoro ribonucleotide
  modified_base 12..21: mod_base = OTHER; note = 2'-O-methyl ribonucleotide
  modified_base 1..3: mod_base = OTHER; note = phosphorothioate linkage
gaaccgcccattcctgtttga

SEQ ID NO: 706 - RNA, 21 nt, synthetic construct
  source 1..21: mol_type = other RNA
  modified_base 1..6: mod_base = OTHER; note = 2'-O-methyl ribonucleotide
  modified_base 7: mod_base = OTHER; note = 2'-fluoro ribonucleotide
  modified_base 8: mod_base = OTHER; note = 2'-O-methyl ribonucleotide
  modified_base 9: mod_base = OTHER; note = 2'-fluoro ribonucleotide
  modified_base 10: mod_base = OTHER; note = 2'-O-methyl ribonucleotide
  modified_base 11: mod_base = OTHER; note = 2'-fluoro ribonucleotide
  modified_base 12..21: mod_base = OTHER; note = 2'-O-methyl ribonucleotide
  modified_base 1..3: mod_base = OTHER; note = phosphorothioate linkage
aaccgcccattcctgtttgca

SEQ ID NO: 707 - RNA, 21 nt, synthetic construct
  source 1..21: mol_type = other RNA
  modified_base 1..6: mod_base = OTHER; note = 2'-O-methyl ribonucleotide
  modified_base 7: mod_base = OTHER; note = 2'-fluoro ribonucleotide
  modified_base 8: mod_base = OTHER; note = 2'-O-methyl ribonucleotide
  modified_base 9: mod_base = OTHER; note = 2'-fluoro ribonucleotide
  modified_base 10: mod_base = OTHER; note = 2'-O-methyl ribonucleotide
  modified_base 11: mod_base = OTHER; note = 2'-fluoro ribonucleotide
  modified_base 12..21: mod_base = OTHER; note = 2'-O-methyl ribonucleotide
  modified_base 1..3: mod_base = OTHER; note = phosphorothioate linkage
accgcccattcctgtttgcta

SEQ ID NO: 708 - RNA, 21 nt, synthetic construct
  source 1..21: mol_type = other RNA
  modified_base 1..6: mod_base = OTHER; note = 2'-O-methyl ribonucleotide
  modified_base 7: mod_base = OTHER; note = 2'-fluoro ribonucleotide
  modified_base 8: mod_base = OTHER; note = 2'-O-methyl ribonucleotide
  modified_base 9: mod_base = OTHER; note = 2'-fluoro ribonucleotide
  modified_base 10: mod_base = OTHER; note = 2'-O-methyl ribonucleotide
  modified_base 11: mod_base = OTHER; note = 2'-fluoro ribonucleotide
  modified_base 12..21: mod_base = OTHER; note = 2'-O-methyl ribonucleotide
  modified_base 1..3: mod_base = OTHER; note = phosphorothioate linkage
cctgtttgctgtgtatgatca

SEQ ID NO: 709 - RNA, 21 nt, synthetic construct
  source 1..21: mol_type = other RNA
  modified_base 1..6: mod_base = OTHER; note = 2'-O-methyl ribonucleotide
  modified_base 7: mod_base = OTHER; note = 2'-fluoro ribonucleotide
  modified_base 8: mod_base = OTHER; note = 2'-O-methyl ribonucleotide
  modified_base 9: mod_base = OTHER; note = 2'-fluoro ribonucleotide
  modified_base 10: mod_base = OTHER; note = 2'-O-methyl ribonucleotide
  modified_base 11: mod_base = OTHER; note = 2'-fluoro ribonucleotide
  modified_base 12..21: mod_base = OTHER; note = 2'-O-methyl ribonucleotide
  modified_base 1..3: mod_base = OTHER; note = phosphorothioate linkage
tgctgtgtatgatcaaagcga

SEQ ID NO: 710 - RNA, 21 nt, synthetic construct
  source 1..21: mol_type = other RNA
  modified_base 1..6: mod_base = OTHER; note = 2'-O-methyl ribonucleotide
  modified_base 7: mod_base = OTHER; note = 2'-fluoro ribonucleotide
  modified_base 8: mod_base = OTHER; note = 2'-O-methyl ribonucleotide
  modified_base 9: mod_base = OTHER; note = 2'-fluoro ribonucleotide
  modified_base 10: mod_base = OTHER; note = 2'-O-methyl ribonucleotide
  modified_base 11: mod_base = OTHER; note = 2'-fluoro ribonucleotide
  modified_base 12..21: mod_base = OTHER; note = 2'-O-methyl ribonucleotide
  modified_base 1..3: mod_base = OTHER; note = phosphorothioate linkage
gctgtgtatgatcaaagcgca

SEQ ID NO: 711 - RNA, 21 nt, synthetic construct
  source 1..21: mol_type = other RNA
  modified_base 1..6: mod_base = OTHER; note = 2'-O-methyl ribonucleotide
  modified_base 7: mod_base = OTHER; note = 2'-fluoro ribonucleotide
  modified_base 8: mod_base = OTHER; note = 2'-O-methyl ribonucleotide
  modified_base 9: mod_base = OTHER; note = 2'-fluoro ribonucleotide
  modified_base 10: mod_base = OTHER; note = 2'-O-methyl ribonucleotide
  modified_base 11: mod_base = OTHER; note = 2'-fluoro ribonucleotide
  modified_base 12..21: mod_base = OTHER; note = 2'-O-methyl ribonucleotide
  modified_base 1..3: mod_base = OTHER; note = phosphorothioate linkage
ctgtgtatgatcaaagcgcca

SEQ ID NO: 712 - RNA, 21 nt, synthetic construct
  source 1..21: mol_type = other RNA
  modified_base 1..6: mod_base = OTHER; note = 2'-O-methyl ribonucleotide
  modified_base 7: mod_base = OTHER; note = 2'-fluoro ribonucleotide
  modified_base 8: mod_base = OTHER; note = 2'-O-methyl ribonucleotide
  modified_base 9: mod_base = OTHER; note = 2'-fluoro ribonucleotide
  modified_base 10: mod_base = OTHER; note = 2'-O-methyl ribonucleotide
  modified_base 11: mod_base = OTHER; note = 2'-fluoro ribonucleotide
  modified_base 12..21: mod_base = OTHER; note = 2'-O-methyl ribonucleotide
  modified_base 1..3: mod_base = OTHER; note = phosphorothioate linkage
tgtatgatcaaagcgccacta

SEQ ID NO: 713 - RNA, 21 nt, synthetic construct
  source 1..21: mol_type = other RNA
  modified_base 1..6: mod_base = OTHER; note = 2'-O-methyl ribonucleotide
  modified_base 7: mod_base = OTHER; note = 2'-fluoro ribonucleotide
  modified_base 8: mod_base = OTHER; note = 2'-O-methyl ribonucleotide
  modified_base 9: mod_base = OTHER; note = 2'-fluoro ribonucleotide
  modified_base 10: mod_base = OTHER; note = 2'-O-methyl ribonucleotide
  modified_base 11: mod_base = OTHER; note = 2'-fluoro ribonucleotide
  modified_base 12..21: mod_base = OTHER; note = 2'-O-methyl ribonucleotide
  modified_base 1..3: mod_base = OTHER; note = phosphorothioate linkage
tatgatcaaagcgccactgca

SEQ ID NO: 714 - RNA, 21 nt, synthetic construct
  source 1..21: mol_type = other RNA
  modified_base 1..6: mod_base = OTHER; note = 2'-O-methyl ribonucleotide
  modified_base 7: mod_base = OTHER; note = 2'-fluoro ribonucleotide
  modified_base 8: mod_base = OTHER; note = 2'-O-methyl ribonucleotide
  modified_base 9: mod_base = OTHER; note = 2'-fluoro ribonucleotide
  modified_base 10: mod_base = OTHER; note = 2'-O-methyl ribonucleotide
  modified_base 11: mod_base = OTHER; note = 2'-fluoro ribonucleotide
  modified_base 12..21: mod_base = OTHER; note = 2'-O-methyl ribonucleotide
  modified_base 1..3: mod_base = OTHER; note = phosphorothioate linkage
tgatcaaagcgccactgccca

SEQ ID NO: 715 - RNA, 21 nt, synthetic construct
  source 1..21: mol_type = other RNA
  modified_base 1..6: mod_base = OTHER; note = 2'-O-methyl ribonucleotide
  modified_base 7: mod_base = OTHER; note = 2'-fluoro ribonucleotide
  modified_base 8: mod_base = OTHER; note = 2'-O-methyl ribonucleotide
  modified_base 9: mod_base = OTHER; note = 2'-fluoro ribonucleotide
  modified_base 10: mod_base = OTHER; note = 2'-O-methyl ribonucleotide
  modified_base 11: mod_base = OTHER; note = 2'-fluoro ribonucleotide
  modified_base 12..21: mod_base = OTHER; note = 2'-O-methyl ribonucleotide
  modified_base 1..3: mod_base = OTHER; note = phosphorothioate linkage
gatcaaagcgccactgcccta

SEQ ID NO: 716 - RNA, 21 nt, synthetic construct
  source 1..21: mol_type = other RNA
  modified_base 1..6: mod_base = OTHER; note = 2'-O-methyl ribonucleotide
  modified_base 7: mod_base = OTHER; note = 2'-fluoro ribonucleotide
  modified_base 8: mod_base = OTHER; note = 2'-O-methyl ribonucleotide
  modified_base 9: mod_base = OTHER; note = 2'-fluoro ribonucleotide
  modified_base 10: mod_base = OTHER; note = 2'-O-methyl ribonucleotide
  modified_base 11: mod_base = OTHER; note = 2'-fluoro ribonucleotide
  modified_base 12..21: mod_base = OTHER; note = 2'-O-methyl ribonucleotide
  modified_base 1..3: mod_base = OTHER; note = phosphorothioate linkage
atcaaagcgccactgccctga

SEQ ID NO: 717 - RNA, 21 nt, synthetic construct
  source 1..21: mol_type = other RNA
  modified_base 1..6: mod_base = OTHER; note = 2'-O-methyl ribonucleotide
  modified_base 7: mod_base = OTHER; note = 2'-fluoro ribonucleotide
  modified_base 8: mod_base = OTHER; note = 2'-O-methyl ribonucleotide
  modified_base 9: mod_base = OTHER; note = 2'-fluoro ribonucleotide
  modified_base 10: mod_base = OTHER; note = 2'-O-methyl ribonucleotide
  modified_base 11: mod_base = OTHER; note = 2'-fluoro ribonucleotide
  modified_base 12..21: mod_base = OTHER; note = 2'-O-methyl ribonucleotide
  modified_base 1..3: mod_base = OTHER; note = phosphorothioate linkage
ggccgcgtggccaacccgcta

SEQ ID NO: 718 - RNA, 21 nt, synthetic construct
  source 1..21: mol_type = other RNA
  modified_base 1..6: mod_base = OTHER; note = 2'-O-methyl ribonucleotide
  modified_base 7: mod_base = OTHER; note = 2'-fluoro ribonucleotide
  modified_base 8: mod_base = OTHER; note = 2'-O-methyl ribonucleotide
  modified_base 9: mod_base = OTHER; note = 2'-fluoro ribonucleotide
  modified_base 10: mod_base = OTHER; note = 2'-O-methyl ribonucleotide
  modified_base 11: mod_base = OTHER; note = 2'-fluoro ribonucleotide
  modified_base 12..21: mod_base = OTHER; note = 2'-O-methyl ribonucleotide
  modified_base 1..3: mod_base = OTHER; note = phosphorothioate linkage
acccgctgagcacagcatgaa

SEQ ID NO: 719 - RNA, 21 nt, synthetic construct
  source 1..21: mol_type = other RNA
  modified_base 1..6: mod_base = OTHER; note = 2'-O-methyl ribonucleotide
  modified_base 7: mod_base = OTHER; note = 2'-fluoro ribonucleotide
  modified_base 8: mod_base = OTHER; note = 2'-O-methyl ribonucleotide
  modified_base 9: mod_base = OTHER; note = 2'-fluoro ribonucleotide
  modified_base 10: mod_base = OTHER; note = 2'-O-methyl ribonucleotide
  modified_base 11: mod_base = OTHER; note = 2'-fluoro ribonucleotide
  modified_base 12..21: mod_base = OTHER; note = 2'-O-methyl ribonucleotide
  modified_base 1..3: mod_base = OTHER; note = phosphorothioate linkage
gcctttgaggcaaaggccaga

SEQ ID NO: 720 - RNA, 21 nt, synthetic construct
  source 1..21: mol_type = other RNA
  modified_base 1..6: mod_base = OTHER; note = 2'-O-methyl ribonucleotide
  modified_base 7: mod_base = OTHER; note = 2'-fluoro ribonucleotide
  modified_base 8: mod_base = OTHER; note = 2'-O-methyl ribonucleotide
  modified_base 9: mod_base = OTHER; note = 2'-fluoro ribonucleotide
  modified_base 10: mod_base = OTHER; note = 2'-O-methyl ribonucleotide
  modified_base 11: mod_base = OTHER; note = 2'-fluoro ribonucleotide
  modified_base 12..21: mod_base = OTHER; note = 2'-O-methyl ribonucleotide
  modified_base 1..3: mod_base = OTHER; note = phosphorothioate linkage
cctttgaggcaaaggccagca

SEQ ID NO: 721 - RNA, 21 nt, synthetic construct
  source 1..21: mol_type = other RNA
  modified_base 1..6: mod_base = OTHER; note = 2'-O-methyl ribonucleotide
  modified_base 7: mod_base = OTHER; note = 2'-fluoro ribonucleotide
  modified_base 8: mod_base = OTHER; note = 2'-O-methyl ribonucleotide
  modified_base 9: mod_base = OTHER; note = 2'-fluoro ribonucleotide
  modified_base 10: mod_base = OTHER; note = 2'-O-methyl ribonucleotide
  modified_base 11: mod_base = OTHER; note = 2'-fluoro ribonucleotide
  modified_base 12..21: mod_base = OTHER; note = 2'-O-methyl ribonucleotide
  modified_base 1..3: mod_base = OTHER; note = phosphorothioate linkage
gcagataacaaccccggacaa

SEQ ID NO: 722 - RNA, 21 nt, synthetic construct
  source 1..21: mol_type = other RNA
  modified_base 1..6: mod_base = OTHER; note = 2'-O-methyl ribonucleotide
  modified_base 7: mod_base = OTHER; note = 2'-fluoro ribonucleotide
  modified_base 8: mod_base = OTHER; note = 2'-O-methyl ribonucleotide
  modified_base 9: mod_base = OTHER; note = 2'-fluoro ribonucleotide
  modified_base 10: mod_base = OTHER; note = 2'-O-methyl ribonucleotide
  modified_base 11: mod_base = OTHER; note = 2'-fluoro ribonucleotide
  modified_base 12..21: mod_base = OTHER; note = 2'-O-methyl ribonucleotide
  modified_base 1..3: mod_base = OTHER; note = phosphorothioate linkage
ccttttcttctaatgagtcga

SEQ ID NO: 723 - RNA, 21 nt, synthetic construct
  source 1..21: mol_type = other RNA
  modified_base 1..6: mod_base = OTHER; note = 2'-O-methyl ribonucleotide
  modified_base 7: mod_base = OTHER; note = 2'-fluoro ribonucleotide
  modified_base 8: mod_base = OTHER; note = 2'-O-methyl ribonucleotide
  modified_base 9: mod_base = OTHER; note = 2'-fluoro ribonucleotide
  modified_base 10: mod_base = OTHER; note = 2'-O-methyl ribonucleotide
  modified_base 11: mod_base = OTHER; note = 2'-fluoro ribonucleotide
  modified_base 12..21: mod_base = OTHER; note = 2'-O-methyl ribonucleotide
  modified_base 1..3: mod_base = OTHER; note = phosphorothioate linkage
cttttcttctaatgagtcgaa

SEQ ID NO: 724 - RNA, 21 nt, synthetic construct
  source 1..21: mol_type = other RNA
  modified_base 1..6: mod_base = OTHER; note = 2'-O-methyl ribonucleotide
  modified_base 7: mod_base = OTHER; note = 2'-fluoro ribonucleotide
  modified_base 8: mod_base = OTHER; note = 2'-O-methyl ribonucleotide
  modified_base 9: mod_base = OTHER; note = 2'-fluoro ribonucleotide
  modified_base 10: mod_base = OTHER; note = 2'-O-methyl ribonucleotide
  modified_base 11: mod_base = OTHER; note = 2'-fluoro ribonucleotide
  modified_base 12..21: mod_base = OTHER; note = 2'-O-methyl ribonucleotide
  modified_base 1..3: mod_base = OTHER; note = phosphorothioate linkage
ttttcttctaatgagtcgaca

SEQ ID NO: 725 - RNA, 21 nt, synthetic construct
  source 1..21: mol_type = other RNA
  modified_base 1..6: mod_base = OTHER; note = 2'-O-methyl ribonucleotide
  modified_base 7: mod_base = OTHER; note = 2'-fluoro ribonucleotide
  modified_base 8: mod_base = OTHER; note = 2'-O-methyl ribonucleotide
  modified_base 9: mod_base = OTHER; note = 2'-fluoro ribonucleotide
  modified_base 10: mod_base = OTHER; note = 2'-O-methyl ribonucleotide
  modified_base 11: mod_base = OTHER; note = 2'-fluoro ribonucleotide
  modified_base 12..21: mod_base = OTHER; note = 2'-O-methyl ribonucleotide
  modified_base 1..3: mod_base = OTHER; note = phosphorothioate linkage
tttcttctaatgagtcgacta

SEQ ID NO: 726 - RNA, 21 nt, synthetic construct
  source 1..21: mol_type = other RNA
  modified_base 1..6: mod_base = OTHER; note = 2'-O-methyl ribonucleotide
  modified_base 7: mod_base = OTHER; note = 2'-fluoro ribonucleotide
  modified_base 8: mod_base = OTHER; note = 2'-O-methyl ribonucleotide
  modified_base 9: mod_base = OTHER; note = 2'-fluoro ribonucleotide
  modified_base 10: mod_base = OTHER; note = 2'-O-methyl ribonucleotide
  modified_base 11: mod_base = OTHER; note = 2'-fluoro ribonucleotide
  modified_base 12..21: mod_base = OTHER; note = 2'-O-methyl ribonucleotide
  modified_base 1..3: mod_base = OTHER; note = phosphorothioate linkage
ttcttctaatgagtcgactta

SEQ ID NO: 727 - RNA, 21 nt, synthetic construct
  source 1..21: mol_type = other RNA
  modified_base 1..6: mod_base = OTHER; note = 2'-O-methyl ribonucleotide
  modified_base 7: mod_base = OTHER; note = 2'-fluoro ribonucleotide
  modified_base 8: mod_base = OTHER; note = 2'-O-methyl ribonucleotide
  modified_base 9: mod_base = OTHER; note = 2'-fluoro ribonucleotide
  modified_base 10: mod_base = OTHER; note = 2'-O-methyl ribonucleotide
  modified_base 11: mod_base = OTHER; note = 2'-fluoro ribonucleotide
  modified_base 12..21: mod_base = OTHER; note = 2'-O-methyl ribonucleotide
  modified_base 1..3: mod_base = OTHER; note = phosphorothioate linkage
ttctaatgagtcgactttgaa

SEQ ID NO: 728 - RNA, 21 nt, synthetic construct
  source 1..21: mol_type = other RNA
  modified_base 1..6: mod_base = OTHER; note = 2'-O-methyl ribonucleotide
  modified_base 7: mod_base = OTHER; note = 2'-fluoro ribonucleotide
  modified_base 8: mod_base = OTHER; note = 2'-O-methyl ribonucleotide
  modified_base 9: mod_base = OTHER; note = 2'-fluoro ribonucleotide
  modified_base 10: mod_base = OTHER; note = 2'-O-methyl ribonucleotide
  modified_base 11: mod_base = OTHER; note = 2'-fluoro ribonucleotide
  modified_base 12..21: mod_base = OTHER; note = 2'-O-methyl ribonucleotide
  modified_base 1..3: mod_base = OTHER; note = phosphorothioate linkage
ttgagctggaaagcagccgta

SEQ ID NO: 729 - RNA, 21 nt, synthetic construct
  source 1..21: mol_type = other RNA
  modified_base 1..6: mod_base = OTHER; note = 2'-O-methyl ribonucleotide
  modified_base 7: mod_base = OTHER; note = 2'-fluoro ribonucleotide
  modified_base 8: mod_base = OTHER; note = 2'-O-methyl ribonucleotide
  modified_base 9: mod_base = OTHER; note = 2'-fluoro ribonucleotide
  modified_base 10: mod_base = OTHER; note = 2'-O-methyl ribonucleotide
  modified_base 11: mod_base = OTHER; note = 2'-fluoro ribonucleotide
  modified_base 12..21: mod_base = OTHER; note = 2'-O-methyl ribonucleotide
  modified_base 1..3: mod_base = OTHER; note = phosphorothioate linkage
cagccgtttctccttggtcta

SEQ ID NO: 730 - RNA, 21 nt, synthetic construct
  source 1..21: mol_type = other RNA
  modified_base 1..6: mod_base = OTHER; note = 2'-O-methyl ribonucleotide
  modified_base 7: mod_base = OTHER; note = 2'-fluoro ribonucleotide
  modified_base 8: mod_base = OTHER; note = 2'-O-methyl ribonucleotide
  modified_base 9: mod_base = OTHER; note = 2'-fluoro ribonucleotide
  modified_base 10: mod_base = OTHER; note = 2'-O-methyl ribonucleotide
  modified_base 11: mod_base = OTHER; note = 2'-fluoro ribonucleotide
  modified_base 12..21: mod_base = OTHER; note = 2'-O-methyl ribonucleotide
  modified_base 1..3: mod_base = OTHER; note = phosphorothioate linkage
ccgtttctccttggtctaaga

SEQ ID NO: 731 - RNA, 21 nt, synthetic construct
  source 1..21: mol_type = other RNA
  modified_base 1..6: mod_base = OTHER; note = 2'-O-methyl ribonucleotide
  modified_base 7: mod_base = OTHER; note = 2'-fluoro ribonucleotide
  modified_base 8: mod_base = OTHER; note = 2'-O-methyl ribonucleotide
  modified_base 9: mod_base = OTHER; note = 2'-fluoro ribonucleotide
  modified_base 10: mod_base = OTHER; note = 2'-O-methyl ribonucleotide
  modified_base 11: mod_base = OTHER; note = 2'-fluoro ribonucleotide
  modified_base 12..21: mod_base = OTHER; note = 2'-O-methyl ribonucleotide
  modified_base 1..3: mod_base = OTHER; note = phosphorothioate linkage
cgtttctccttggtctaagta

SEQ ID NO: 732 - RNA, 21 nt, synthetic construct
  source 1..21: mol_type = other RNA
  modified_base 1..6: mod_base = OTHER; note = 2'-O-methyl ribonucleotide
  modified_base 7: mod_base = OTHER; note = 2'-fluoro ribonucleotide
  modified_base 8: mod_base = OTHER; note = 2'-O-methyl ribonucleotide
  modified_base 9: mod_base = OTHER; note = 2'-fluoro ribonucleotide
  modified_base 10: mod_base = OTHER; note = 2'-O-methyl ribonucleotide
  modified_base 11: mod_base = OTHER; note = 2'-fluoro ribonucleotide
  modified_base 12..21: mod_base = OTHER; note = 2'-O-methyl ribonucleotide
  modified_base 1..3: mod_base = OTHER; note = phosphorothioate linkage
gcaagaaccagtgtttagcga

SEQ ID NO: 733 - RNA, 21 nt, synthetic construct
  source 1..21: mol_type = other RNA
  modified_base 1..6: mod_base = OTHER; note = 2'-O-methyl ribonucleotide
  modified_base 7: mod_base = OTHER; note = 2'-fluoro ribonucleotide
  modified_base 8: mod_base = OTHER; note = 2'-O-methyl ribonucleotide
  modified_base 9: mod_base = OTHER; note = 2'-fluoro ribonucleotide
  modified_base 10: mod_base = OTHER; note = 2'-O-methyl ribonucleotide
  modified_base 11: mod_base = OTHER; note = 2'-fluoro ribonucleotide
  modified_base 12..21: mod_base = OTHER; note = 2'-O-methyl ribonucleotide
  modified_base 1..3: mod_base = OTHER; note = phosphorothioate linkage
caagaaccagtgtttagcgca

SEQ ID NO: 734 - RNA, 21 nt, synthetic construct
  source 1..21: mol_type = other RNA
  modified_base 1..6: mod_base = OTHER; note = 2'-O-methyl ribonucleotide
  modified_base 7: mod_base = OTHER; note = 2'-fluoro ribonucleotide
  modified_base 8: mod_base = OTHER; note = 2'-O-methyl ribonucleotide
  modified_base 9: mod_base = OTHER; note = 2'-fluoro ribonucleotide
  modified_base 10: mod_base = OTHER; note = 2'-O-methyl ribonucleotide
  modified_base 11: mod_base = OTHER; note = 2'-fluoro ribonucleotide
  modified_base 12..21: mod_base = OTHER; note = 2'-O-methyl ribonucleotide
  modified_base 1..3: mod_base = OTHER; note = phosphorothioate linkage
aagaaccagtgtttagcgcga

SEQ ID NO: 735 - RNA, 21 nt, synthetic construct
  source 1..21: mol_type = other RNA
  modified_base 1..6: mod_base = OTHER; note = 2'-O-methyl ribonucleotide
  modified_base 7: mod_base = OTHER; note = 2'-fluoro ribonucleotide
  modified_base 8: mod_base = OTHER; note = 2'-O-methyl ribonucleotide
  modified_base 9: mod_base = OTHER; note = 2'-fluoro ribonucleotide
  modified_base 10: mod_base = OTHER; note = 2'-O-methyl ribonucleotide
  modified_base 11: mod_base = OTHER; note = 2'-fluoro ribonucleotide
  modified_base 12..21: mod_base = OTHER; note = 2'-O-methyl ribonucleotide
  modified_base 1..3: mod_base = OTHER; note = phosphorothioate linkage
aaccagtgtttagcgcgggaa

SEQ ID NO: 736 - RNA, 21 nt, synthetic construct
  source 1..21: mol_type = other RNA
  modified_base 1..6: mod_base = OTHER; note = 2'-O-methyl ribonucleotide
  modified_base 7: mod_base = OTHER; note = 2'-fluoro ribonucleotide
  modified_base 8: mod_base = OTHER; note = 2'-O-methyl ribonucleotide
  modified_base 9: mod_base = OTHER; note = 2'-fluoro ribonucleotide
  modified_base 10: mod_base = OTHER; note = 2'-O-methyl ribonucleotide
  modified_base 11: mod_base = OTHER; note = 2'-fluoro ribonucleotide
  modified_base 12..21: mod_base = OTHER; note = 2'-O-methyl ribonucleotide
  modified_base 1..3: mod_base = OTHER; note = phosphorothioate linkage
ccagtgtttagcgcgggacta

SEQ ID NO: 737 - RNA, 21 nt, synthetic construct
  source 1..21: mol_type = other RNA
  modified_base 1..6: mod_base = OTHER; note = 2'-O-methyl ribonucleotide
  modified_base 7: mod_base = OTHER; note = 2'-fluoro ribonucleotide
  modified_base 8: mod_base = OTHER; note = 2'-O-methyl ribonucleotide
  modified_base 9: mod_base = OTHER; note = 2'-fluoro ribonucleotide
  modified_base 10: mod_base = OTHER; note = 2'-O-methyl ribonucleotide
  modified_base 11: mod_base = OTHER; note = 2'-fluoro ribonucleotide
  modified_base 12..21: mod_base = OTHER; note = 2'-O-methyl ribonucleotide
  modified_base 1..3: mod_base = OTHER; note = phosphorothioate linkage
agtgtttagcgcgggactaca

SEQ ID NO: 738 - RNA, 21 nt, synthetic construct
  source 1..21: mol_type = other RNA
  modified_base 1..6: mod_base = OTHER; note = 2'-O-methyl ribonucleotide
  modified_base 7: mod_base = OTHER; note = 2'-fluoro ribonucleotide
  modified_base 8: mod_base = OTHER; note = 2'-O-methyl ribonucleotide
  modified_base 9: mod_base = OTHER; note = 2'-fluoro ribonucleotide
  modified_base 10: mod_base = OTHER; note = 2'-O-methyl ribonucleotide
  modified_base 11: mod_base = OTHER; note = 2'-fluoro ribonucleotide
  modified_base 12..21: mod_base = OTHER; note = 2'-O-methyl ribonucleotide
  modified_base 1..3: mod_base = OTHER; note = phosphorothioate linkage
ttagcgcgggactactgttca

SEQ ID NO: 739 - RNA, 21 nt, synthetic construct
  source 1..21: mol_type = other RNA
  modified_base 1..6: mod_base = OTHER; note = 2'-O-methyl ribonucleotide
  modified_base 7: mod_base = OTHER; note = 2'-fluoro ribonucleotide
  modified_base 8: mod_base = OTHER; note = 2'-O-methyl ribonucleotide
  modified_base 9: mod_base = OTHER; note = 2'-fluoro ribonucleotide
  modified_base 10: mod_base = OTHER; note = 2'-O-methyl ribonucleotide
  modified_base 11: mod_base = OTHER; note = 2'-fluoro ribonucleotide
  modified_base 12..21: mod_base = OTHER; note = 2'-O-methyl ribonucleotide
  modified_base 1..3: mod_base = OTHER; note = phosphorothioate linkage
tagcgcgggactactgttcca

SEQ ID NO: 740 - RNA, 21 nt, synthetic construct
  source 1..21: mol_type = other RNA
  modified_base 1..6: mod_base = OTHER; note = 2'-O-methyl ribonucleotide
  modified_base 7: mod_base = OTHER; note = 2'-fluoro ribonucleotide
  modified_base 8: mod_base = OTHER; note = 2'-O-methyl ribonucleotide
  modified_base 9: mod_base = OTHER; note = 2'-fluoro ribonucleotide
  modified_base 10: mod_base = OTHER; note = 2'-O-methyl ribonucleotide
  modified_base 11: mod_base = OTHER; note = 2'-fluoro ribonucleotide
  modified_base 12..21: mod_base = OTHER; note = 2'-O-methyl ribonucleotide
  modified_base 1..3: mod_base = OTHER; note = phosphorothioate linkage
gcgcgggactactgttccaaa

SEQ ID NO: 741 - RNA, 21 nt, synthetic construct
  source 1..21: mol_type = other RNA
  modified_base 1..6: mod_base = OTHER; note = 2'-O-methyl ribonucleotide
  modified_base 7: mod_base = OTHER; note = 2'-fluoro ribonucleotide
  modified_base 8: mod_base = OTHER; note = 2'-O-methyl ribonucleotide
  modified_base 9: mod_base = OTHER; note = 2'-fluoro ribonucleotide
  modified_base 10: mod_base = OTHER; note = 2'-O-methyl ribonucleotide
  modified_base 11: mod_base = OTHER; note = 2'-fluoro ribonucleotide
  modified_base 12..21: mod_base = OTHER; note = 2'-O-methyl ribonucleotide
  modified_base 1..3: mod_base = OTHER; note = phosphorothioate linkage
caaaaagaattccaaccgaca

SEQ ID NO: 742 - RNA, 21 nt, synthetic construct
  source 1..21: mol_type = other RNA
  modified_base 1..6: mod_base = OTHER; note = 2'-O-methyl ribonucleotide
  modified_base 7: mod_base = OTHER; note = 2'-fluoro ribonucleotide
  modified_base 8: mod_base = OTHER; note = 2'-O-methyl ribonucleotide
  modified_base 9: mod_base = OTHER; note = 2'-fluoro ribonucleotide
  modified_base 10: mod_base = OTHER; note = 2'-O-methyl ribonucleotide
  modified_base 11: mod_base = OTHER; note = 2'-fluoro ribonucleotide
  modified_base 12..21: mod_base = OTHER; note = 2'-O-methyl ribonucleotide
  modified_base 1..3: mod_base = OTHER; note = phosphorothioate linkage
aaaaagaattccaaccgacca

SEQ ID NO: 743 - RNA, 21 nt, synthetic construct
  source 1..21: mol_type = other RNA
  modified_base 1..6: mod_base = OTHER; note = 2'-O-methyl ribonucleotide
  modified_base 7: mod_base = OTHER; note = 2'-fluoro ribonucleotide
  modified_base 8: mod_base = OTHER; note = 2'-O-methyl ribonucleotide
  modified_base 9: mod_base = OTHER; note = 2'-fluoro ribonucleotide
  modified_base 10: mod_base = OTHER; note = 2'-O-methyl ribonucleotide
  modified_base 11: mod_base = OTHER; note = 2'-fluoro ribonucleotide
  modified_base 12..21: mod_base = OTHER; note = 2'-O-methyl ribonucleotide
  modified_base 1..3: mod_base = OTHER; note = phosphorothioate linkage
agaattccaaccgaccagcta

SEQ ID NO: 744 - RNA, 21 nt, synthetic construct
  source 1..21: mol_type = other RNA
  modified_base 1..6: mod_base = OTHER; note = 2'-O-methyl ribonucleotide
  modified_base 7: mod_base = OTHER; note = 2'-fluoro ribonucleotide
  modified_base 8: mod_base = OTHER; note = 2'-O-methyl ribonucleotide
  modified_base 9: mod_base = OTHER; note = 2'-fluoro ribonucleotide
  modified_base 10: mod_base = OTHER; note = 2'-O-methyl ribonucleotide
  modified_base 11: mod_base = OTHER; note = 2'-fluoro ribonucleotide
  modified_base 12..21: mod_base = OTHER; note = 2'-O-methyl ribonucleotide
  modified_base 1..3: mod_base = OTHER; note = phosphorothioate linkage
gaattccaaccgaccagctta

SEQ ID NO: 745 - RNA, 21 nt, synthetic construct
  source 1..21: mol_type = other RNA
  modified_base 1..6: mod_base = OTHER; note = 2'-O-methyl ribonucleotide
  modified_base 7: mod_base = OTHER; note = 2'-fluoro ribonucleotide
  modified_base 8: mod_base = OTHER; note = 2'-O-methyl ribonucleotide
  modified_base 9: mod_base = OTHER; note = 2'-fluoro ribonucleotide
  modified_base 10: mod_base = OTHER; note = 2'-O-methyl ribonucleotide
  modified_base 11: mod_base = OTHER; note = 2'-fluoro ribonucleotide
  modified_base 12..21: mod_base = OTHER; note = 2'-O-methyl ribonucleotide
  modified_base 1..3: mod_base = OTHER; note = phosphorothioate linkage
aattccaaccgaccagcttga

SEQ ID NO: 746 - RNA, 21 nt, synthetic construct
  source 1..21: mol_type = other RNA
  modified_base 1..6: mod_base = OTHER; note = 2'-O-methyl ribonucleotide
  modified_base 7: mod_base = OTHER; note = 2'-fluoro ribonucleotide
  modified_base 8: mod_base = OTHER; note = 2'-O-methyl ribonucleotide
  modified_base 9: mod_base = OTHER; note = 2'-fluoro ribonucleotide
  modified_base 10: mod_base = OTHER; note = 2'-O-methyl ribonucleotide
  modified_base 11: mod_base = OTHER; note = 2'-fluoro ribonucleotide
  modified_base 12..21: mod_base = OTHER; note = 2'-O-methyl ribonucleotide
  modified_base 1..3: mod_base = OTHER; note = phosphorothioate linkage
attccaaccgaccagcttgta

SEQ ID NO: 747 - RNA, 21 nt, synthetic construct
  source 1..21: mol_type = other RNA
  modified_base 1..6: mod_base = OTHER; note = 2'-O-methyl ribonucleotide
  modified_base 7: mod_base = OTHER; note = 2'-fluoro ribonucleotide
  modified_base 8: mod_base = OTHER; note = 2'-O-methyl ribonucleotide
  modified_base 9: mod_base = OTHER; note = 2'-fluoro ribonucleotide
  modified_base 10: mod_base = OTHER; note = 2'-O-methyl ribonucleotide
  modified_base 11: mod_base = OTHER; note = 2'-fluoro ribonucleotide
  modified_base 12..21: mod_base = OTHER; note = 2'-O-methyl ribonucleotide
  modified_base 1..3: mod_base = OTHER; note = phosphorothioate linkage
ttccaaccgaccagcttgtta

SEQ ID NO: 748 - RNA, 21 nt, synthetic construct
  source 1..21: mol_type = other RNA
  modified_base 1..6: mod_base = OTHER; note = 2'-O-methyl ribonucleotide
  modified_base 7: mod_base = OTHER; note = 2'-fluoro ribonucleotide
  modified_base 8: mod_base = OTHER; note = 2'-O-methyl ribonucleotide
  modified_base 9: mod_base = OTHER; note = 2'-fluoro ribonucleotide
  modified_base 10: mod_base = OTHER; note = 2'-O-methyl ribonucleotide
  modified_base 11: mod_base = OTHER; note = 2'-fluoro ribonucleotide
  modified_base 12..21: mod_base = OTHER; note = 2'-O-methyl ribonucleotide
  modified_base 1..3: mod_base = OTHER; note = phosphorothioate linkage
tccaaccgaccagcttgttta

SEQ ID NO: 749 - RNA, 21 nt, synthetic construct
  source 1..21: mol_type = other RNA
  modified_base 1..6: mod_base = OTHER; note = 2'-O-methyl ribonucleotide
  modified_base 7: mod_base = OTHER; note = 2'-fluoro ribonucleotide
  modified_base 8: mod_base = OTHER; note = 2'-O-methyl ribonucleotide
  modified_base 9: mod_base = OTHER; note = 2'-fluoro ribonucleotide
  modified_base 10: mod_base = OTHER; note = 2'-O-methyl ribonucleotide
  modified_base 11: mod_base = OTHER; note = 2'-fluoro ribonucleotide
  modified_base 12..21: mod_base = OTHER; note = 2'-O-methyl ribonucleotide
  modified_base 1..3: mod_base = OTHER; note = phosphorothioate linkage
ttgccttcggtttgtatttaa

SEQ ID NO: 750 - RNA, 21 nt, synthetic construct
  source 1..21: mol_type = other RNA
  modified_base 1..6: mod_base = OTHER; note = 2'-O-methyl ribonucleotide
  modified_base 7: mod_base = OTHER; note = 2'-fluoro ribonucleotide
  modified_base 8: mod_base = OTHER; note = 2'-O-methyl ribonucleotide
  modified_base 9: mod_base = OTHER; note = 2'-fluoro ribonucleotide
  modified_base 10: mod_base = OTHER; note = 2'-O-methyl ribonucleotide
  modified_base 11: mod_base = OTHER; note = 2'-fluoro ribonucleotide
  modified_base 12..21: mod_base = OTHER; note = 2'-O-methyl ribonucleotide
  modified_base 1..3: mod_base = OTHER; note = phosphorothioate linkage
tcggtttgtatttagtgtcta

SEQ ID NO: 751 - RNA, 21 nt, synthetic construct
  source 1..21: mol_type = other RNA
  modified_base 1..6: mod_base = OTHER; note = 2'-O-methyl ribonucleotide
  modified_base 7: mod_base = OTHER; note = 2'-fluoro ribonucleotide
  modified_base 8: mod_base = OTHER; note = 2'-O-methyl ribonucleotide
  modified_base 9: mod_base = OTHER; note = 2'-fluoro ribonucleotide
  modified_base 10: mod_base = OTHER; note = 2'-O-methyl ribonucleotide
  modified_base 11: mod_base = OTHER; note = 2'-fluoro ribonucleotide
  modified_base 12..21: mod_base = OTHER; note = 2'-O-methyl ribonucleotide
  modified_base 1..3: mod_base = OTHER; note = phosphorothioate linkage
atgtaagaacatgacctccga

SEQ ID NO: 752 - RNA, 21 nt, synthetic construct
  source 1..21: mol_type = other RNA
  modified_base 1..6: mod_base = OTHER; note = 2'-O-methyl ribonucleotide
  modified_base 7: mod_base = OTHER; note = 2'-fluoro ribonucleotide
  modified_base 8: mod_base = OTHER; note = 2'-O-methyl ribonucleotide
  modified_base 9: mod_base = OTHER; note = 2'-fluoro ribonucleotide
  modified_base 10: mod_base = OTHER; note = 2'-O-methyl ribonucleotide
  modified_base 11: mod_base = OTHER; note = 2'-fluoro ribonucleotide
  modified_base 12..21: mod_base = OTHER; note = 2'-O-methyl ribonucleotide
  modified_base 1..3: mod_base = OTHER; note = phosphorothioate linkage
gaacatgacctccgtgtagta

SEQ ID NO: 753 - RNA, 21 nt, synthetic construct
  source 1..21: mol_type = other RNA
  modified_base 1..6: mod_base = OTHER; note = 2'-O-methyl ribonucleotide
  modified_base 7: mod_base = OTHER; note = 2'-fluoro ribonucleotide
  modified_base 8: mod_base = OTHER; note = 2'-O-methyl ribonucleotide
  modified_base 9: mod_base = OTHER; note = 2'-fluoro ribonucleotide
  modified_base 10: mod_base = OTHER; note = 2'-O-methyl ribonucleotide
  modified_base 11: mod_base = OTHER; note = 2'-fluoro ribonucleotide
  modified_base 12..21: mod_base = OTHER; note = 2'-O-methyl ribonucleotide
  modified_base 1..3: mod_base = OTHER; note = phosphorothioate linkage
acctccgtgtagtgtctgtaa

SEQ ID NO: 754 - RNA, 21 nt, synthetic construct
  source 1..21: mol_type = other RNA
  modified_base 1..6: mod_base = OTHER; note = 2'-O-methyl ribonucleotide
  modified_base 7: mod_base = OTHER; note = 2'-fluoro ribonucleotide
  modified_base 8: mod_base = OTHER; note = 2'-O-methyl ribonucleotide
  modified_base 9: mod_base = OTHER; note = 2'-fluoro ribonucleotide
  modified_base 10: mod_base = OTHER; note = 2'-O-methyl ribonucleotide
  modified_base 11: mod_base = OTHER; note = 2'-fluoro ribonucleotide
  modified_base 12..21: mod_base = OTHER; note = 2'-O-methyl ribonucleotide
  modified_base 1..3: mod_base = OTHER; note = phosphorothioate linkage
gtagtgtctgtaataccttaa

SEQ ID NO: 755 - RNA, 21 nt, synthetic construct
  source 1..21: mol_type = other RNA
  modified_base 1..6: mod_base = OTHER; note = 2'-O-methyl ribonucleotide
  modified_base 7: mod_base = OTHER; note = 2'-fluoro ribonucleotide
  modified_base 8: mod_base = OTHER; note = 2'-O-methyl ribonucleotide
  modified_base 9: mod_base = OTHER; note = 2'-fluoro ribonucleotide
  modified_base 10: mod_base = OTHER; note = 2'-O-methyl ribonucleotide
  modified_base 11: mod_base = OTHER; note = 2'-fluoro ribonucleotide
  modified_base 12..21: mod_base = OTHER; note = 2'-O-methyl ribonucleotide
  modified_base 1..3: mod_base = OTHER; note = phosphorothioate linkage
tttgaacaatacgtgaaagaa

SEQ ID NO: 756 - RNA, 21 nt, synthetic construct
  source 1..21: mol_type = other RNA
  modified_base 1..6: mod_base = OTHER; note = 2'-O-methyl ribonucleotide
  modified_base 7: mod_base = OTHER; note = 2'-fluoro ribonucleotide
  modified_base 8: mod_base = OTHER; note = 2'-O-methyl ribonucleotide
  modified_base 9: mod_base = OTHER; note = 2'-fluoro ribonucleotide
  modified_base 10: mod_base = OTHER; note = 2'-O-methyl ribonucleotide
  modified_base 11: mod_base = OTHER; note = 2'-fluoro ribonucleotide
  modified_base 12..21: mod_base = OTHER; note = 2'-O-methyl ribonucleotide
  modified_base 1..3: mod_base = OTHER; note = phosphorothioate linkage
ttgaacaatacgtgaaagata

SEQ ID NO: 757 - RNA, 21 nt, synthetic construct
  source 1..21: mol_type = other RNA
  modified_base 1..6: mod_base = OTHER; note = 2'-O-methyl ribonucleotide
  modified_base 7: mod_base = OTHER; note = 2'-fluoro ribonucleotide
  modified_base 8: mod_base = OTHER; note = 2'-O-methyl ribonucleotide
  modified_base 9: mod_base = OTHER; note = 2'-fluoro ribonucleotide
  modified_base 10: mod_base = OTHER; note = 2'-O-methyl ribonucleotide
  modified_base 11: mod_base = OTHER; note = 2'-fluoro ribonucleotide
  modified_base 12..21: mod_base = OTHER; note = 2'-O-methyl ribonucleotide
  modified_base 1..3: mod_base = OTHER; note = phosphorothioate linkage
tgaacaatacgtgaaagatga

SEQ ID NO: 758 - RNA, 21 nt, synthetic construct
  source 1..21: mol_type = other RNA
  modified_base 1..6: mod_base = OTHER; note = 2'-O-methyl ribonucleotide
  modified_base 7: mod_base = OTHER; note = 2'-fluoro ribonucleotide
  modified_base 8: mod_base = OTHER; note = 2'-O-methyl ribonucleotide
  modified_base 9: mod_base = OTHER; note = 2'-fluoro ribonucleotide
  modified_base 10: mod_base = OTHER; note = 2'-O-methyl ribonucleotide
  modified_base 11: mod_base = OTHER; note = 2'-fluoro ribonucleotide
  modified_base 12..21: mod_base = OTHER; note = 2'-O-methyl ribonucleotide
  modified_base 1..3: mod_base = OTHER; note = phosphorothioate linkage
gaacaatacgtgaaagatgca

SEQ ID NO: 759 - RNA, 21 nt, synthetic construct
  source 1..21: mol_type = other RNA
  modified_base 1..6: mod_base = OTHER; note = 2'-O-methyl ribonucleotide
  modified_base 7: mod_base = OTHER; note = 2'-fluoro ribonucleotide
  modified_base 8: mod_base = OTHER; note = 2'-O-methyl ribonucleotide
  modified_base 9: mod_base = OTHER; note = 2'-fluoro ribonucleotide
  modified_base 10: mod_base = OTHER; note = 2'-O-methyl ribonucleotide
  modified_base 11: mod_base = OTHER; note = 2'-fluoro ribonucleotide
  modified_base 12..21: mod_base = OTHER; note = 2'-O-methyl ribonucleotide
  modified_base 1..3: mod_base = OTHER; note = phosphorothioate linkage
acaatacgtgaaagatgcaaa

SEQ ID NO: 760 - RNA, 21 nt, synthetic construct
  source 1..21: mol_type = other RNA
  modified_base 1..6: mod_base = OTHER; note = 2'-O-methyl ribonucleotide
  modified_base 7: mod_base = OTHER; note = 2'-fluoro ribonucleotide
  modified_base 8: mod_base = OTHER; note = 2'-O-methyl ribonucleotide
  modified_base 9: mod_base = OTHER; note = 2'-fluoro ribonucleotide
  modified_base 10: mod_base = OTHER; note = 2'-O-methyl ribonucleotide
  modified_base 11: mod_base = OTHER; note = 2'-fluoro ribonucleotide
  modified_base 12..21: mod_base = OTHER; note = 2'-O-methyl ribonucleotide
  modified_base 1..3: mod_base = OTHER; note = phosphorothioate linkage
gaaagatgcaagcacctgaaa

SEQ ID NO: 761 - RNA, 21 nt, synthetic construct
  source 1..21: mol_type = other RNA
  modified_base 1..6: mod_base = OTHER; note = 2'-O-methyl ribonucleotide
  modified_base 7: mod_base = OTHER; note = 2'-fluoro ribonucleotide
  modified_base 8: mod_base = OTHER; note = 2'-O-methyl ribonucleotide
  modified_base 9: mod_base = OTHER; note = 2'-fluoro ribonucleotide
  modified_base 10: mod_base = OTHER; note = 2'-O-methyl ribonucleotide
  modified_base 11: mod_base = OTHER; note = 2'-fluoro ribonucleotide
  modified_base 12..21: mod_base = OTHER; note = 2'-O-methyl ribonucleotide
  modified_base 1..3: mod_base = OTHER; note = phosphorothioate linkage
tgaatttctgtttgaatgcga

SEQ ID NO: 762 - RNA, 21 nt, synthetic construct
  source 1..21: mol_type = other RNA
  modified_base 1..6: mod_base = OTHER; note = 2'-O-methyl ribonucleotide
  modified_base 7: mod_base = OTHER; note = 2'-fluoro ribonucleotide
  modified_base 8: mod_base = OTHER; note = 2'-O-methyl ribonucleotide
  modified_base 9: mod_base = OTHER; note = 2'-fluoro ribonucleotide
  modified_base 10: mod_base = OTHER; note = 2'-O-methyl ribonucleotide
  modified_base 11: mod_base = OTHER; note = 2'-fluoro ribonucleotide
  modified_base 12..21: mod_base = OTHER; note = 2'-O-methyl ribonucleotide
  modified_base 1..3: mod_base = OTHER; note = phosphorothioate linkage
ttgtgttagtaataaacgtca

SEQ ID NO: 763 - RNA, 21 nt, synthetic construct
  source 1..21: mol_type = other RNA
  modified_base 1..6: mod_base = OTHER; note = 2'-O-methyl ribonucleotide
  modified_base 7: mod_base = OTHER; note = 2'-fluoro ribonucleotide
  modified_base 8: mod_base = OTHER; note = 2'-O-methyl ribonucleotide
  modified_base 9: mod_base = OTHER; note = 2'-fluoro ribonucleotide
  modified_base 10: mod_base = OTHER; note = 2'-O-methyl ribonucleotide
  modified_base 11: mod_base = OTHER; note = 2'-fluoro ribonucleotide
  modified_base 12..21: mod_base = OTHER; note = 2'-O-methyl ribonucleotide
  modified_base 1..3: mod_base = OTHER; note = phosphorothioate linkage
gtgttagtaataaacgtctta

SEQ ID NO: 764 - RNA, 21 nt, synthetic construct
  source 1..21: mol_type = other RNA
  modified_base 1..6: mod_base = OTHER; note = 2'-O-methyl ribonucleotide
  modified_base 7: mod_base = OTHER; note = 2'-fluoro ribonucleotide
  modified_base 8: mod_base = OTHER; note = 2'-O-methyl ribonucleotide
  modified_base 9: mod_base = OTHER; note = 2'-fluoro ribonucleotide
  modified_base 10: mod_base = OTHER; note = 2'-O-methyl ribonucleotide
  modified_base 11: mod_base = OTHER; note = 2'-fluoro ribonucleotide
  modified_base 12..21: mod_base = OTHER; note = 2'-O-methyl ribonucleotide
  modified_base 1..3: mod_base = OTHER; note = phosphorothioate linkage
taataaacgtcttgccacaaa

SEQ ID NO: 765 - RNA, 21 nt, synthetic construct
  source 1..21: mol_type = other RNA
  modified_base 1..6: mod_base = OTHER; note = 2'-O-methyl ribonucleotide
  modified_base 7: mod_base = OTHER; note = 2'-fluoro ribonucleotide
  modified_base 8: mod_base = OTHER; note = 2'-O-methyl ribonucleotide
  modified_base 9: mod_base = OTHER; note = 2'-fluoro ribonucleotide
  modified_base 10: mod_base = OTHER; note = 2'-O-methyl ribonucleotide
  modified_base 11: mod_base = OTHER; note = 2'-fluoro ribonucleotide
  modified_base 12..21: mod_base = OTHER; note = 2'-O-methyl ribonucleotide
  modified_base 1..3: mod_base = OTHER; note = phosphorothioate linkage
aataaacgtcttgccacaata

SEQ ID NO: 766 - RNA, 21 nt, synthetic construct
  source 1..21: mol_type = other RNA
  modified_base 1..6: mod_base = OTHER; note = 2'-O-methyl ribonucleotide
  modified_base 7: mod_base = OTHER; note = 2'-fluoro ribonucleotide
  modified_base 8: mod_base = OTHER; note = 2'-O-methyl ribonucleotide
  modified_base 9: mod_base = OTHER; note = 2'-fluoro ribonucleotide
  modified_base 10: mod_base = OTHER; note = 2'-O-methyl ribonucleotide
  modified_base 11: mod_base = OTHER; note = 2'-fluoro ribonucleotide
  modified_base 12..21: mod_base = OTHER; note = 2'-O-methyl ribonucleotide
  modified_base 1..3: mod_base = OTHER; note = phosphorothioate linkage
aaacgtcttgccacaataaga

SEQ ID NO: 767 - RNA, 21 nt, synthetic construct
  source 1..21: mol_type = other RNA
  modified_base 1..6: mod_base = OTHER; note = 2'-O-methyl ribonucleotide
  modified_base 7: mod_base = OTHER; note = 2'-fluoro ribonucleotide
  modified_base 8: mod_base = OTHER; note = 2'-O-methyl ribonucleotide
  modified_base 9: mod_base = OTHER; note = 2'-fluoro ribonucleotide
  modified_base 10: mod_base = OTHER; note = 2'-O-methyl ribonucleotide
  modified_base 11: mod_base = OTHER; note = 2'-fluoro ribonucleotide
  modified_base 12..21: mod_base = OTHER; note = 2'-O-methyl ribonucleotide
  modified_base 1..3: mod_base = OTHER; note = phosphorothioate linkage
aacgtcttgccacaataagca

SEQ ID NO: 768 - RNA, 21 nt, synthetic construct
  source 1..21: mol_type = other RNA
  modified_base 1..6: mod_base = OTHER; note = 2'-O-methyl ribonucleotide
  modified_base 7: mod_base = OTHER; note = 2'-fluoro ribonucleotide
  modified_base 8: mod_base = OTHER; note = 2'-O-methyl ribonucleotide
  modified_base 9: mod_base = OTHER; note = 2'-fluoro ribonucleotide
  modified_base 10: mod_base = OTHER; note = 2'-O-methyl ribonucleotide
  modified_base 11: mod_base = OTHER; note = 2'-fluoro ribonucleotide
  modified_base 12..21: mod_base = OTHER; note = 2'-O-methyl ribonucleotide
  modified_base 1..3: mod_base = OTHER; note = phosphorothioate linkage
acgtcttgccacaataagcca

SEQ ID NO: 769 - RNA, 23 nt, synthetic construct
  source 1..23: mol_type = other RNA
ttctcattgtggatgacgaggtg

SEQ ID NO: 770 - RNA, 23 nt, synthetic construct
  source 1..23: mol_type = other RNA
tctctcattgtggatgacgaggt

SEQ ID NO: 771 - RNA, 23 nt, synthetic construct
  source 1..23: mol_type = other RNA
ttactctcattgtggatgacgag

SEQ ID NO: 772 - RNA, 23 nt, synthetic construct
  source 1..23: mol_type = other RNA
tgtactctcattgtggatgacga

SEQ ID NO: 773 - RNA, 23 nt, synthetic construct
  source 1..23: mol_type = other RNA
taggtactctcattgtggatgac

SEQ ID NO: 774 - RNA, 23 nt, synthetic construct
  source 1..23: mol_type = other RNA
tcaggtactctcattgtggatga

SEQ ID NO: 775 - RNA, 23 nt, synthetic construct
  source 1..23: mol_type = other RNA
tcacaggtactctcattgtggat

SEQ ID NO: 776 - RNA, 23 nt, synthetic construct
  source 1..23: mol_type = other RNA
ttcacaggtactctcattgtgga

SEQ ID NO: 777 - RNA, 23 nt, synthetic construct
  source 1..23: mol_type = other RNA
ttgctcacaggtactctcattgt

SEQ ID NO: 778 - RNA, 23 nt, synthetic construct
  source 1..23: mol_type = other RNA
ttcaacttgtcttcggtgtcaag

SEQ ID NO: 779 - RNA, 23 nt, synthetic construct
  source 1..23: mol_type = other RNA
ttacggaagcccaagaagttggc

SEQ ID NO: 780 - RNA, 23 nt, synthetic construct
  source 1..23: mol_type = other RNA
tatacggaagcccaagaagttgg

SEQ ID NO: 781 - RNA, 23 nt, synthetic construct
  source 1..23: mol_type = other RNA
tatatacggaagcccaagaagtt

SEQ ID NO: 782 - RNA, 23 nt, synthetic construct
  source 1..23: mol_type = other RNA
ttatatacggaagcccaagaagt

SEQ ID NO: 783 - RNA, 23 nt, synthetic construct
  source 1..23: mol_type = other RNA
tatatatacggaagcccaagaag

SEQ ID NO: 784 - RNA, 23 nt, synthetic construct
  source 1..23: mol_type = other RNA
tcatatatacggaagcccaagaa

SEQ ID NO: 785 - RNA, 23 nt, synthetic construct
  source 1..23: mol_type = other RNA
tccatatatacggaagcccaaga

SEQ ID NO: 786 - RNA, 23 nt, synthetic construct
  source 1..23: mol_type = other RNA
tatgccatatatacggaagccca

SEQ ID NO: 787 - RNA, 23 nt, synthetic construct
  source 1..23: mol_type = other RNA
ttgcatgccatatatacggaagc

SEQ ID NO: 788 - RNA, 23 nt, synthetic construct
  source 1..23: mol_type = other RNA
tactgtgcatgccatatatacgg

SEQ ID NO: 789 - RNA, 23 nt, synthetic construct
  source 1..23: mol_type = other RNA
tatagctcactgtgcatgccata

SEQ ID NO: 790 - RNA, 23 nt, synthetic construct
  source 1..23: mol_type = other RNA
ttgcagttcttgtccttccaagg

SEQ ID NO: 791 - RNA, 23 nt, synthetic construct
  source 1..23: mol_type = other RNA
taacctgtcaatcttctcagcag

SEQ ID NO: 792 - RNA, 23 nt, synthetic construct
  source 1..23: mol_type = other RNA
tgaacctgtcaatcttctcagca

SEQ ID NO: 793 - RNA, 23 nt, synthetic construct
  source 1..23: mol_type = other RNA
ttgaacctgtcaatcttctcagc

SEQ ID NO: 794 - RNA, 23 nt, synthetic construct
  source 1..23: mol_type = other RNA
tatgaacctgtcaatcttctcag

SEQ ID NO: 795 - RNA, 23 nt, synthetic construct
  source 1..23: mol_type = other RNA
tagttttgctggaaagtgagacc

SEQ ID NO: 796 - RNA, 23 nt, synthetic construct
  source 1..23: mol_type = other RNA
tgagttttgctggaaagtgagac

SEQ ID NO: 797 - RNA, 23 nt, synthetic construct
  source 1..23: mol_type = other RNA
tagggagttttgctggaaagtga

SEQ ID NO: 798 - RNA, 23 nt, synthetic construct
  source 1..23: mol_type = other RNA
tttgagggagttttgctggaaag

SEQ ID NO: 799 - RNA, 23 nt, synthetic construct
  source 1..23: mol_type = other RNA
tgttgagggagttttgctggaaa

SEQ ID NO: 800 - RNA, 23 nt, synthetic construct
  source 1..23: mol_type = other RNA
tagttgagggagttttgctggaa

SEQ ID NO: 801 - RNA, 23 nt, synthetic construct
  source 1..23: mol_type = other RNA
tttcatccagttgagggagtttt

SEQ ID NO: 802 - RNA, 23 nt, synthetic construct
  source 1..23: mol_type = other RNA
ttcttcatccagttgagggagtt

SEQ ID NO: 803 - RNA, 23 nt, synthetic construct
  source 1..23: mol_type = other RNA
tgtttcttcatccagttgaggga

SEQ ID NO: 804 - RNA, 23 nt, synthetic construct
  source 1..23: mol_type = other RNA
tttttgcaggttcagctcggtgt

SEQ ID NO: 805 - RNA, 23 nt, synthetic construct
  source 1..23: mol_type = other RNA
tatttttgcaggttcagctcggt

SEQ ID NO: 806 - RNA, 23 nt, synthetic construct
  source 1..23: mol_type = other RNA
tcaatttttgcaggttcagctcg

SEQ ID NO: 807 - RNA, 23 nt, synthetic construct
  source 1..23: mol_type = other RNA
ttcaatttttgcaggttcagctc

SEQ ID NO: 808 - RNA, 23 nt, synthetic construct
  source 1..23: mol_type = other RNA
tctcaatttttgcaggttcagct

SEQ ID NO: 809 - RNA, 23 nt, synthetic construct
  source 1..23: mol_type = other RNA
tattgctcaatttttgcaggttc

SEQ ID NO: 810 - RNA, 23 nt, synthetic construct
  source 1..23: mol_type = other RNA
tttgggtagactctgtgggctct

SEQ ID NO: 811 - RNA, 23 nt, synthetic construct
  source 1..23: mol_type = other RNA
ttacacagcaaacaggaatgggc

SEQ ID NO: 812 - RNA, 23 nt, synthetic construct
  source 1..23: mol_type = other RNA
tcatacacagcaaacaggaatgg

SEQ ID NO: 813 - RNA, 23 nt, synthetic construct
  source 1..23: mol_type = other RNA
tgatcatacacagcaaacaggaa

SEQ ID NO: 814 - RNA, 23 nt, synthetic construct
  source 1..23: mol_type = other RNA
tttgatcatacacagcaaacagg

SEQ ID NO: 815 - RNA, 23 nt, synthetic construct
  source 1..23: mol_type = other RNA
tctttgatcatacacagcaaaca

SEQ ID NO: 816 - RNA, 23 nt, synthetic construct
  source 1..23: mol_type = other RNA
ttagaagaaaaggtgggagactg

SEQ ID NO: 817 - RNA, 23 nt, synthetic construct
  source 1..23: mol_type = other RNA
tttagaagaaaaggtgggagact

SEQ ID NO: 818 - RNA, 23 nt, synthetic construct
  source 1..23: mol_type = other RNA
ttcattagaagaaaaggtgggag

SEQ ID NO: 819 - RNA, 23 nt, synthetic construct
  source 1..23: mol_type = other RNA
tactcattagaagaaaaggtggg

SEQ ID NO: 820 - RNA, 23 nt, synthetic construct
  source 1..23: mol_type = other RNA
tagaccaaggagaaacggctgct

SEQ ID NO: 821 - RNA, 23 nt, synthetic construct
  source 1..23: mol_type = other RNA
taaacactggttcttgcctcccc

SEQ ID NO: 822 - RNA, 23 nt, synthetic construct
  source 1..23: mol_type = other RNA
ttaaacactggttcttgcctccc

SEQ ID NO: 823 - RNA, 23 nt, synthetic construct
  source 1..23: mol_type = other RNA
tctaaacactggttcttgcctcc

SEQ ID NO: 824 - RNA, 23 nt, synthetic construct
  source 1..23: mol_type = other RNA
tgctaaacactggttcttgcctc

SEQ ID NO: 825 - RNA, 23 nt, synthetic construct
  source 1..23: mol_type = other RNA
tgttggaattctttttggaacag

SEQ ID NO: 826 - RNA, 23 nt, synthetic construct
  source 1..23: mol_type = other RNA
tgtcggttggaattctttttgga

SEQ ID NO: 827 - RNA, 23 nt, synthetic construct
  source 1..23: mol_type = other RNA
taagctggtcggttggaattctt

SEQ ID NO: 828 - RNA, 23 nt, synthetic construct
  source 1..23: mol_type = other RNA
taaacaagctggtcggttggaat

SEQ ID NO: 829 - RNA, 23 nt, synthetic construct
  source 1..23: mol_type = other RNA
tttcacaaacaagctggtcggtt

SEQ ID NO: 830 - RNA, 23 nt, synthetic construct
  source 1..23: mol_type = other RNA
ttttcacaaacaagctggtcggt

SEQ ID NO: 831 - RNA, 23 nt, synthetic construct
  source 1..23: mol_type = other RNA
tgtttcacaaacaagctggtcgg

SEQ ID NO: 832 - RNA, 23 nt, synthetic construct
  source 1..23: mol_type = other RNA
ttgtttcacaaacaagctggtcg

SEQ ID NO: 833 - RNA, 23 nt, synthetic construct
  source 1..23: mol_type = other RNA
  modified_base 1: mod_base = OTHER; note = 2'-O-methyl ribonucleotide
  modified_base 2: mod_base = OTHER; note = 2'-fluoro ribonucleotide
  modified_base 3..6: mod_base = OTHER; note = 2'-O-methyl ribonucleotide
  modified_base 7: mod_base = OTHER; note = 2'-fluoro ribonucleotide
  modified_base 8..11: mod_base = OTHER; note = 2'-O-methyl ribonucleotide
  modified_base 12: mod_base = OTHER; note = 2'-fluoro ribonucleotide
  modified_base 13: mod_base = OTHER; note = 2'-O-methyl ribonucleotide
  modified_base 14: mod_base = OTHER; note = 2'-fluoro ribonucleotide
  modified_base 15: mod_base = OTHER; note = 2'-O-methyl ribonucleotide
  modified_base 16: mod_base = OTHER; note = 2'-fluoro ribonucleotide
  modified_base 17..23: mod_base = OTHER; note = 2'-O-methyl ribonucleotide
  modified_base 1..3: mod_base = OTHER; note = phosphorothioate linkage
  modified_base 21..23: mod_base = OTHER; note = phosphorothioate linkage
ttctcattgtggatgacgaggtg

SEQ ID NO: 834 - RNA, 23 nt, synthetic construct
  source 1..23: mol_type = other RNA
  modified_base 1: mod_base = OTHER; note = 2'-O-methyl ribonucleotide
  modified_base 2: mod_base = OTHER; note = 2'-fluoro ribonucleotide
  modified_base 3..6: mod_base = OTHER; note = 2'-O-methyl ribonucleotide
  modified_base 7: mod_base = OTHER; note = 2'-fluoro ribonucleotide
  modified_base 8..11: mod_base = OTHER; note = 2'-O-methyl ribonucleotide
  modified_base 12: mod_base = OTHER; note = 2'-fluoro ribonucleotide
  modified_base 13: mod_base = OTHER; note = 2'-O-methyl ribonucleotide
  modified_base 14: mod_base = OTHER; note = 2'-fluoro ribonucleotide
  modified_base 15: mod_base = OTHER; note = 2'-O-methyl ribonucleotide
  modified_base 16: mod_base = OTHER; note = 2'-fluoro ribonucleotide
  modified_base 17..23: mod_base = OTHER; note = 2'-O-methyl ribonucleotide
  modified_base 1..3: mod_base = OTHER; note = phosphorothioate linkage
  modified_base 21..23: mod_base = OTHER; note = phosphorothioate linkage
tctctcattgtggatgacgaggt

SEQ ID NO: 835 - RNA, 23 nt, synthetic construct
  source 1..23: mol_type = other RNA
  modified_base 1: mod_base = OTHER; note = 2'-O-methyl ribonucleotide
  modified_base 2: mod_base = OTHER; note = 2'-fluoro ribonucleotide
  modified_base 3..6: mod_base = OTHER; note = 2'-O-methyl ribonucleotide
  modified_base 7: mod_base = OTHER; note = 2'-fluoro ribonucleotide
  modified_base 8..11: mod_base = OTHER; note = 2'-O-methyl ribonucleotide
  modified_base 12: mod_base = OTHER; note = 2'-fluoro ribonucleotide
  modified_base 13: mod_base = OTHER; note = 2'-O-methyl ribonucleotide
  modified_base 14: mod_base = OTHER; note = 2'-fluoro ribonucleotide
  modified_base 15: mod_base = OTHER; note = 2'-O-methyl ribonucleotide
  modified_base 16: mod_base = OTHER; note = 2'-fluoro ribonucleotide
  modified_base 17..23: mod_base = OTHER; note = 2'-O-methyl ribonucleotide
  modified_base 1..3: mod_base = OTHER; note = phosphorothioate linkage
  modified_base 21..23: mod_base = OTHER; note = phosphorothioate linkage
ttactctcattgtggatgacgag

SEQ ID NO: 836 - RNA, 23 nt, synthetic construct
  source 1..23: mol_type = other RNA
  modified_base 1: mod_base = OTHER; note = 2'-O-methyl ribonucleotide
  modified_base 2: mod_base = OTHER; note = 2'-fluoro ribonucleotide
  modified_base 3..6: mod_base = OTHER; note = 2'-O-methyl ribonucleotide
  modified_base 7: mod_base = OTHER; note = 2'-fluoro ribonucleotide
  modified_base 8..11: mod_base = OTHER; note = 2'-O-methyl ribonucleotide
  modified_base 12: mod_base = OTHER; note = 2'-fluoro ribonucleotide
  modified_base 13: mod_base = OTHER; note = 2'-O-methyl ribonucleotide
  modified_base 14: mod_base = OTHER; note = 2'-fluoro ribonucleotide
  modified_base 15: mod_base = OTHER; note = 2'-O-methyl ribonucleotide
  modified_base 16: mod_base = OTHER; note = 2'-fluoro ribonucleotide
  modified_base 17..23: mod_base = OTHER; note = 2'-O-methyl ribonucleotide
  modified_base 1..3: mod_base = OTHER; note = phosphorothioate linkage
  modified_base 21..23: mod_base = OTHER; note = phosphorothioate linkage
tgtactctcattgtggatgacga

SEQ ID NO: 837 - RNA, 23 nt, synthetic construct
  source 1..23: mol_type = other RNA
  modified_base 1: mod_base = OTHER; note = 2'-O-methyl ribonucleotide
  modified_base 2: mod_base = OTHER; note = 2'-fluoro ribonucleotide
  modified_base 3..6: mod_base = OTHER; note = 2'-O-methyl ribonucleotide
  modified_base 7: mod_base = OTHER; note = 2'-fluoro ribonucleotide
  modified_base 8..11: mod_base = OTHER; note = 2'-O-methyl ribonucleotide
  modified_base 12: mod_base = OTHER; note = 2'-fluoro ribonucleotide
  modified_base 13: mod_base = OTHER; note = 2'-O-methyl ribonucleotide
  modified_base 14: mod_base = OTHER; note = 2'-fluoro ribonucleotide
  modified_base 15: mod_base = OTHER; note = 2'-O-methyl ribonucleotide
  modified_base 16: mod_base = OTHER; note = 2'-fluoro ribonucleotide
  modified_base 17..23: mod_base = OTHER; note = 2'-O-methyl ribonucleotide
  modified_base 1..3: mod_base = OTHER; note = phosphorothioate linkage
  modified_base 21..23: mod_base = OTHER; note = phosphorothioate linkage
taggtactctcattgtggatgac

SEQ ID NO: 838 - RNA, 23 nt, synthetic construct
  source 1..23: mol_type = other RNA
  modified_base 1: mod_base = OTHER; note = 2'-O-methyl ribonucleotide
  modified_base 2: mod_base = OTHER; note = 2'-fluoro ribonucleotide
  modified_base 3..6: mod_base = OTHER; note = 2'-O-methyl ribonucleotide
  modified_base 7: mod_base = OTHER; note = 2'-fluoro ribonucleotide
  modified_base 8..11: mod_base = OTHER; note = 2'-O-methyl ribonucleotide
  modified_base 12: mod_base = OTHER; note = 2'-fluoro ribonucleotide
  modified_base 13: mod_base = OTHER; note = 2'-O-methyl ribonucleotide
  modified_base 14: mod_base = OTHER; note = 2'-fluoro ribonucleotide
  modified_base 15: mod_base = OTHER; note = 2'-O-methyl ribonucleotide
  modified_base 16: mod_base = OTHER; note = 2'-fluoro ribonucleotide
  modified_base 17..23: mod_base = OTHER; note = 2'-O-methyl ribonucleotide
  modified_base 1..3: mod_base = OTHER; note = phosphorothioate linkage
  modified_base 21..23: mod_base = OTHER; note = phosphorothioate linkage
tcaggtactctcattgtggatga

SEQ ID NO: 839 - RNA, 23 nt, synthetic construct
  source 1..23: mol_type = other RNA
  modified_base 1: mod_base = OTHER; note = 2'-O-methyl ribonucleotide
  modified_base 2: mod_base = OTHER; note = 2'-fluoro ribonucleotide
  modified_base 3..6: mod_base = OTHER; note = 2'-O-methyl ribonucleotide
  modified_base 7: mod_base = OTHER; note = 2'-fluoro ribonucleotide
  modified_base 8..11: mod_base = OTHER; note = 2'-O-methyl ribonucleotide
  modified_base 12: mod_base = OTHER; note = 2'-fluoro ribonucleotide
  modified_base 13: mod_base = OTHER; note = 2'-O-methyl ribonucleotide
  modified_base 14: mod_base = OTHER; note = 2'-fluoro ribonucleotide
  modified_base 15: mod_base = OTHER; note = 2'-O-methyl ribonucleotide
  modified_base 16: mod_base = OTHER; note = 2'-fluoro ribonucleotide
  modified_base 17..23: mod_base = OTHER; note = 2'-O-methyl ribonucleotide
  modified_base 1..3: mod_base = OTHER; note = phosphorothioate linkage
  modified_base 21..23: mod_base = OTHER; note = phosphorothioate linkage
tcacaggtactctcattgtggat

SEQ ID NO: 840 - RNA, 23 nt, synthetic construct
  source 1..23: mol_type = other RNA
  modified_base 1: mod_base = OTHER; note = 2'-O-methyl ribonucleotide
  modified_base 2: mod_base = OTHER; note = 2'-fluoro ribonucleotide
  modified_base 3..6: mod_base = OTHER; note = 2'-O-methyl ribonucleotide
  modified_base 7: mod_base = OTHER; note = 2'-fluoro ribonucleotide
  modified_base 8..11: mod_base = OTHER; note = 2'-O-methyl ribonucleotide
  modified_base 12: mod_base = OTHER; note = 2'-fluoro ribonucleotide
  modified_base 13: mod_base = OTHER; note = 2'-O-methyl ribonucleotide
  modified_base 14: mod_base = OTHER; note = 2'-fluoro ribonucleotide
  modified_base 15: mod_base = OTHER; note = 2'-O-methyl ribonucleotide
  modified_base 16: mod_base = OTHER; note = 2'-fluoro ribonucleotide
  modified_base 17..23: mod_base = OTHER; note = 2'-O-methyl ribonucleotide
  modified_base 1..3: mod_base = OTHER; note = phosphorothioate linkage
  modified_base 21..23: mod_base = OTHER; note = phosphorothioate linkage
ttcacaggtactctcattgtgga

SEQ ID NO: 841 - RNA, 23 nt, synthetic construct
  source 1..23: mol_type = other RNA
  modified_base 1: mod_base = OTHER; note = 2'-O-methyl ribonucleotide
  modified_base 2: mod_base = OTHER; note = 2'-fluoro ribonucleotide
  modified_base 3..6: mod_base = OTHER; note = 2'-O-methyl ribonucleotide
  modified_base 7: mod_base = OTHER; note = 2'-fluoro ribonucleotide
  modified_base 8..11: mod_base = OTHER; note = 2'-O-methyl ribonucleotide
  modified_base 12: mod_base = OTHER; note = 2'-fluoro ribonucleotide
  modified_base 13: mod_base = OTHER; note = 2'-O-methyl ribonucleotide
  modified_base 14: mod_base = OTHER; note = 2'-fluoro ribonucleotide
  modified_base 15: mod_base = OTHER; note = 2'-O-methyl ribonucleotide
  modified_base 16: mod_base = OTHER; note = 2'-fluoro ribonucleotide
  modified_base 17..23: mod_base = OTHER; note = 2'-O-methyl ribonucleotide
  modified_base 1..3: mod_base = OTHER; note = phosphorothioate linkage
  modified_base 21..23: mod_base = OTHER; note = phosphorothioate linkage
ttgctcacaggtactctcattgt

SEQ ID NO: 842 - RNA, 23 nt, synthetic construct
  source 1..23: mol_type = other RNA
  modified_base 1: mod_base = OTHER; note = 2'-O-methyl ribonucleotide
  modified_base 2: mod_base = OTHER; note = 2'-fluoro ribonucleotide
  modified_base 3..6: mod_base = OTHER; note = 2'-O-methyl ribonucleotide
  modified_base 7: mod_base = OTHER; note = 2'-fluoro ribonucleotide
  modified_base 8..11: mod_base = OTHER; note = 2'-O-methyl ribonucleotide
  modified_base 12: mod_base = OTHER; note = 2'-fluoro ribonucleotide
  modified_base 13: mod_base = OTHER; note = 2'-O-methyl ribonucleotide
  modified_base 14: mod_base = OTHER; note = 2'-fluoro ribonucleotide
  modified_base 15: mod_base = OTHER; note = 2'-O-methyl ribonucleotide
  modified_base 16: mod_base = OTHER; note = 2'-fluoro ribonucleotide
  modified_base 17..23: mod_base = OTHER; note = 2'-O-methyl ribonucleotide
  modified_base 1..3: mod_base = OTHER; note = phosphorothioate linkage
  modified_base 21..23: mod_base = OTHER; note = phosphorothioate linkage
ttcaacttgtcttcggtgtcaag

SEQ ID NO: 843 - RNA, 23 nt, synthetic construct
  source 1..23: mol_type = other RNA
  modified_base 1: mod_base = OTHER; note = 2'-O-methyl ribonucleotide
  modified_base 2: mod_base = OTHER; note = 2'-fluoro ribonucleotide
  modified_base 3..6: mod_base = OTHER; note = 2'-O-methyl ribonucleotide
  modified_base 7: mod_base = OTHER; note = 2'-fluoro ribonucleotide
  modified_base 8..11: mod_base = OTHER; note = 2'-O-methyl ribonucleotide
  modified_base 12: mod_base = OTHER; note = 2'-fluoro ribonucleotide
  modified_base 13: mod_base = OTHER; note = 2'-O-methyl ribonucleotide
  modified_base 14: mod_base = OTHER; note = 2'-fluoro ribonucleotide
  modified_base 15: mod_base = OTHER; note = 2'-O-methyl ribonucleotide
  modified_base 16: mod_base = OTHER; note = 2'-fluoro ribonucleotide
  modified_base 17..23: mod_base = OTHER; note = 2'-O-methyl ribonucleotide
  modified_base 1..3: mod_base = OTHER; note = phosphorothioate linkage
  modified_base 21..23: mod_base = OTHER; note = phosphorothioate linkage
ttacggaagcccaagaagttggc

SEQ ID NO: 844 - RNA, 23 nt, synthetic construct
  source 1..23: mol_type = other RNA
  modified_base 1: mod_base = OTHER; note = 2'-O-methyl ribonucleotide
  modified_base 2: mod_base = OTHER; note = 2'-fluoro ribonucleotide
  modified_base 3..6: mod_base = OTHER; note = 2'-O-methyl ribonucleotide
  modified_base 7: mod_base = OTHER; note = 2'-fluoro ribonucleotide
  modified_base 8..11: mod_base = OTHER; note = 2'-O-methyl ribonucleotide
  modified_base 12: mod_base = OTHER; note = 2'-fluoro ribonucleotide
  modified_base 13: mod_base = OTHER; note = 2'-O-methyl ribonucleotide
  modified_base 14: mod_base = OTHER; note = 2'-fluoro ribonucleotide
  modified_base 15: mod_base = OTHER; note = 2'-O-methyl ribonucleotide
  modified_base 16: mod_base = OTHER; note = 2'-fluoro ribonucleotide
  modified_base 17..23: mod_base = OTHER; note = 2'-O-methyl ribonucleotide
  modified_base 1..3: mod_base = OTHER; note = phosphorothioate linkage
  modified_base 21..23: mod_base = OTHER; note = phosphorothioate linkage
tatacggaagcccaagaagttgg

SEQ ID NO: 845 - RNA, 23 nt, synthetic construct
  source 1..23: mol_type = other RNA
  modified_base 1: mod_base = OTHER; note = 2'-O-methyl ribonucleotide
  modified_base 2: mod_base = OTHER; note = 2'-fluoro ribonucleotide
  modified_base 3..6: mod_base = OTHER; note = 2'-O-methyl ribonucleotide
  modified_base 7: mod_base = OTHER; note = 2'-fluoro ribonucleotide
  modified_base 8..11: mod_base = OTHER; note = 2'-O-methyl ribonucleotide
  modified_base 12: mod_base = OTHER; note = 2'-fluoro ribonucleotide
  modified_base 13: mod_base = OTHER; note = 2'-O-methyl ribonucleotide
  modified_base 14: mod_base = OTHER; note = 2'-fluoro ribonucleotide
  modified_base 15: mod_base = OTHER; note = 2'-O-methyl ribonucleotide
  modified_base 16: mod_base = OTHER; note = 2'-fluoro ribonucleotide
  modified_base 17..23: mod_base = OTHER; note = 2'-O-methyl ribonucleotide
  modified_base 1..3: mod_base = OTHER; note = phosphorothioate linkage
  modified_base 21..23: mod_base = OTHER; note = phosphorothioate linkage
tatatacggaagcccaagaagtt

SEQ ID NO: 846 - RNA, 23 nt, synthetic construct
  source 1..23: mol_type = other RNA
  modified_base 1: mod_base = OTHER; note = 2'-O-methyl ribonucleotide
  modified_base 2: mod_base = OTHER; note = 2'-fluoro ribonucleotide
  modified_base 3..6: mod_base = OTHER; note = 2'-O-methyl ribonucleotide
  modified_base 7: mod_base = OTHER; note = 2'-fluoro ribonucleotide
  modified_base 8..11: mod_base = OTHER; note = 2'-O-methyl ribonucleotide
  modified_base 12: mod_base = OTHER; note = 2'-fluoro ribonucleotide
  modified_base 13: mod_base = OTHER; note = 2'-O-methyl ribonucleotide
  modified_base 14: mod_base = OTHER; note = 2'-fluoro ribonucleotide
  modified_base 15: mod_base = OTHER; note = 2'-O-methyl ribonucleotide
  modified_base 16: mod_base = OTHER; note = 2'-fluoro ribonucleotide
  modified_base 17..23: mod_base = OTHER; note = 2'-O-methyl ribonucleotide
  modified_base 1..3: mod_base = OTHER; note = phosphorothioate linkage
  modified_base 21..23: mod_base = OTHER; note = phosphorothioate linkage
ttatatacggaagcccaagaagt

SEQ ID NO: 847 - RNA, 23 nt, synthetic construct
  source 1..23: mol_type = other RNA
  modified_base 1: mod_base = OTHER; note = 2'-O-methyl ribonucleotide
  modified_base 2: mod_base = OTHER; note = 2'-fluoro ribonucleotide
  modified_base 3..6: mod_base = OTHER; note = 2'-O-methyl ribonucleotide
  modified_base 7: mod_base = OTHER; note = 2'-fluoro ribonucleotide
  modified_base 8..11: mod_base = OTHER; note = 2'-O-methyl ribonucleotide
  modified_base 12: mod_base = OTHER; note = 2'-fluoro ribonucleotide
  modified_base 13: mod_base = OTHER; note = 2'-O-methyl ribonucleotide
  modified_base 14: mod_base = OTHER; note = 2'-fluoro ribonucleotide
  modified_base 15: mod_base = OTHER; note = 2'-O-methyl ribonucleotide
  modified_base 16: mod_base = OTHER; note = 2'-fluoro ribonucleotide
  modified_base 17..23: mod_base = OTHER; note = 2'-O-methyl ribonucleotide
  modified_base 1..3: mod_base = OTHER; note = phosphorothioate linkage
  modified_base 21..23: mod_base = OTHER; note = phosphorothioate linkage
tatatatacggaagcccaagaag

SEQ ID NO: 848 - RNA, 23 nt, synthetic construct
  source 1..23: mol_type = other RNA
  modified_base 1: mod_base = OTHER; note = 2'-O-methyl ribonucleotide
  modified_base 2: mod_base = OTHER; note = 2'-fluoro ribonucleotide
  modified_base 3..6: mod_base = OTHER; note = 2'-O-methyl ribonucleotide
  modified_base 7: mod_base = OTHER; note = 2'-fluoro ribonucleotide
  modified_base 8..11: mod_base = OTHER; note = 2'-O-methyl ribonucleotide
  modified_base 12: mod_base = OTHER; note = 2'-fluoro ribonucleotide
  modified_base 13: mod_base = OTHER; note = 2'-O-methyl ribonucleotide
  modified_base 14: mod_base = OTHER; note = 2'-fluoro ribonucleotide
  modified_base 15: mod_base = OTHER; note = 2'-O-methyl ribonucleotide
  modified_base 16: mod_base = OTHER; note = 2'-fluoro ribonucleotide
  modified_base 17..23: mod_base = OTHER; note = 2'-O-methyl ribonucleotide
  modified_base 1..3: mod_base = OTHER; note = phosphorothioate linkage
  modified_base 21..23: mod_base = OTHER; note = phosphorothioate linkage
tcatatatacggaagcccaagaa

SEQ ID NO: 849 - RNA, 23 nt, synthetic construct
  source 1..23: mol_type = other RNA
  modified_base 1: mod_base = OTHER; note = 2'-O-methyl ribonucleotide
  modified_base 2: mod_base = OTHER; note = 2'-fluoro ribonucleotide
  modified_base 3..6: mod_base = OTHER; note = 2'-O-methyl ribonucleotide
  modified_base 7: mod_base = OTHER; note = 2'-fluoro ribonucleotide
  modified_base 8..11: mod_base = OTHER; note = 2'-O-methyl ribonucleotide
  modified_base 12: mod_base = OTHER; note = 2'-fluoro ribonucleotide
  modified_base 13: mod_base = OTHER; note = 2'-O-methyl ribonucleotide
  modified_base 14: mod_base = OTHER; note = 2'-fluoro ribonucleotide
  modified_base 15: mod_base = OTHER; note = 2'-O-methyl ribonucleotide
  modified_base 16: mod_base = OTHER; note = 2'-fluoro ribonucleotide
  modified_base 17..23: mod_base = OTHER; note = 2'-O-methyl ribonucleotide
  modified_base 1..3: mod_base = OTHER; note = phosphorothioate linkage
  modified_base 21..23: mod_base = OTHER; note = phosphorothioate linkage
tccatatatacggaagcccaaga

SEQ ID NO: 850 - RNA, 23 nt, synthetic construct
  source 1..23: mol_type = other RNA
  modified_base 1: mod_base = OTHER; note = 2'-O-methyl ribonucleotide
  modified_base 2: mod_base = OTHER; note = 2'-fluoro ribonucleotide
  modified_base 3..6: mod_base = OTHER; note = 2'-O-methyl ribonucleotide
  modified_base 7: mod_base = OTHER; note = 2'-fluoro ribonucleotide
  modified_base 8..11: mod_base = OTHER; note = 2'-O-methyl ribonucleotide
  modified_base 12: mod_base = OTHER; note = 2'-fluoro ribonucleotide
  modified_base 13: mod_base = OTHER; note = 2'-O-methyl ribonucleotide
  modified_base 14: mod_base = OTHER; note = 2'-fluoro ribonucleotide
  modified_base 15: mod_base = OTHER; note = 2'-O-methyl ribonucleotide
  modified_base 16: mod_base = OTHER; note = 2'-fluoro ribonucleotide
  modified_base 17..23: mod_base = OTHER; note = 2'-O-methyl ribonucleotide
  modified_base 1..3: mod_base = OTHER; note = phosphorothioate linkage
  modified_base 21..23: mod_base = OTHER; note = phosphorothioate linkage
tatgccatatatacggaagccca

SEQ ID NO: 851 - RNA, 23 nt, synthetic construct
  source 1..23: mol_type = other RNA
  modified_base 1: mod_base = OTHER; note = 2'-O-methyl ribonucleotide
  modified_base 2: mod_base = OTHER; note = 2'-fluoro ribonucleotide
  modified_base 3..6: mod_base = OTHER; note = 2'-O-methyl ribonucleotide
  modified_base 7: mod_base = OTHER; note = 2'-fluoro ribonucleotide
  modified_base 8..11: mod_base = OTHER; note = 2'-O-methyl ribonucleotide
  modified_base 12: mod_base = OTHER; note = 2'-fluoro ribonucleotide
  modified_base 13: mod_base = OTHER; note = 2'-O-methyl ribonucleotide
  modified_base 14: mod_base = OTHER; note = 2'-fluoro ribonucleotide
  modified_base 15: mod_base = OTHER; note = 2'-O-methyl ribonucleotide
  modified_base 16: mod_base = OTHER; note = 2'-fluoro ribonucleotide
  modified_base 17..23: mod_base = OTHER; note = 2'-O-methyl ribonucleotide
  modified_base 1..3: mod_base = OTHER; note = phosphorothioate linkage
  modified_base 21..23: mod_base = OTHER; note = phosphorothioate linkage
ttgcatgccatatatacggaagc

SEQ ID NO: 852 - RNA, 23 nt, synthetic construct
  source 1..23: mol_type = other RNA
  modified_base 1: mod_base = OTHER; note = 2'-O-methyl ribonucleotide
  modified_base 2: mod_base = OTHER; note = 2'-fluoro ribonucleotide
  modified_base 3..6: mod_base = OTHER; note = 2'-O-methyl ribonucleotide
  modified_base 7: mod_base = OTHER; note = 2'-fluoro ribonucleotide
  modified_base 8..11: mod_base = OTHER; note = 2'-O-methyl ribonucleotide
  modified_base 12: mod_base = OTHER; note = 2'-fluoro ribonucleotide
  modified_base 13: mod_base = OTHER; note = 2'-O-methyl ribonucleotide
  modified_base 14: mod_base = OTHER; note = 2'-fluoro ribonucleotide
  modified_base 15: mod_base = OTHER; note = 2'-O-methyl ribonucleotide
  modified_base 16: mod_base = OTHER; note = 2'-fluoro ribonucleotide
  modified_base 17..23: mod_base = OTHER; note = 2'-O-methyl ribonucleotide
  modified_base 1..3: mod_base = OTHER; note = phosphorothioate linkage
  modified_base 21..23: mod_base = OTHER; note = phosphorothioate linkage
tactgtgcatgccatatatacgg

SEQ ID NO: 853 - RNA, 23 nt, synthetic construct
  source 1..23: mol_type = other RNA
  modified_base 1: mod_base = OTHER; note = 2'-O-methyl ribonucleotide
  modified_base 2: mod_base = OTHER; note = 2'-fluoro ribonucleotide
  modified_base 3..6: mod_base = OTHER; note = 2'-O-methyl ribonucleotide
  modified_base 7: mod_base = OTHER; note = 2'-fluoro ribonucleotide
  modified_base 8..11: mod_base = OTHER; note = 2'-O-methyl ribonucleotide
  modified_base 12: mod_base = OTHER; note = 2'-fluoro ribonucleotide
  modified_base 13: mod_base = OTHER; note = 2'-O-methyl ribonucleotide
  modified_base 14: mod_base = OTHER; note = 2'-fluoro ribonucleotide
  modified_base 15: mod_base = OTHER; note = 2'-O-methyl ribonucleotide
  modified_base 16: mod_base = OTHER; note = 2'-fluoro ribonucleotide
  modified_base 17..23: mod_base = OTHER; note = 2'-O-methyl ribonucleotide
  modified_base 1..3: mod_base = OTHER; note = phosphorothioate linkage
  modified_base 21..23: mod_base = OTHER; note = phosphorothioate linkage
tatagctcactgtgcatgccata

SEQ ID NO: 854 - RNA, 23 nt, synthetic construct
  source 1..23: mol_type = other RNA
  modified_base 1: mod_base = OTHER; note = 2'-O-methyl ribonucleotide
  modified_base 2: mod_base = OTHER; note = 2'-fluoro ribonucleotide
  modified_base 3..6: mod_base = OTHER; note = 2'-O-methyl ribonucleotide
  modified_base 7: mod_base = OTHER; note = 2'-fluoro ribonucleotide
  modified_base 8..11: mod_base = OTHER; note = 2'-O-methyl ribonucleotide
  modified_base 12: mod_base = OTHER; note = 2'-fluoro ribonucleotide
  modified_base 13: mod_base = OTHER; note = 2'-O-methyl ribonucleotide
  modified_base 14: mod_base = OTHER; note = 2'-fluoro ribonucleotide
  modified_base 15: mod_base = OTHER; note = 2'-O-methyl ribonucleotide
  modified_base 16: mod_base = OTHER; note = 2'-fluoro ribonucleotide
  modified_base 17..23: mod_base = OTHER; note = 2'-O-methyl ribonucleotide
  modified_base 1..3: mod_base = OTHER; note = phosphorothioate linkage
  modified_base 21..23: mod_base = OTHER; note = phosphorothioate linkage
ttgcagttcttgtccttccaagg

SEQ ID NO: 855 - RNA, 23 nt, synthetic construct
  source 1..23: mol_type = other RNA
  modified_base 1: mod_base = OTHER; note = 2'-O-methyl ribonucleotide
  modified_base 2: mod_base = OTHER; note = 2'-fluoro ribonucleotide
  modified_base 3..6: mod_base = OTHER; note = 2'-O-methyl ribonucleotide
  modified_base 7: mod_base = OTHER; note = 2'-fluoro ribonucleotide
  modified_base 8..11: mod_base = OTHER; note = 2'-O-methyl ribonucleotide
  modified_base 12: mod_base = OTHER; note = 2'-fluoro ribonucleotide
  modified_base 13: mod_base = OTHER; note = 2'-O-methyl ribonucleotide
  modified_base 14: mod_base = OTHER; note = 2'-fluoro ribonucleotide
  modified_base 15: mod_base = OTHER; note = 2'-O-methyl ribonucleotide
  modified_base 16: mod_base = OTHER; note = 2'-fluoro ribonucleotide
  modified_base 17..23: mod_base = OTHER; note = 2'-O-methyl ribonucleotide
  modified_base 1..3: mod_base = OTHER; note = phosphorothioate linkage
  modified_base 21..23: mod_base = OTHER; note = phosphorothioate linkage
taacctgtcaatcttctcagcag

SEQ ID NO: 856 - RNA, 23 nt, synthetic construct
  source 1..23: mol_type = other RNA
  modified_base 1: mod_base = OTHER; note = 2'-O-methyl ribonucleotide
  modified_base 2: mod_base = OTHER; note = 2'-fluoro ribonucleotide
  modified_base 3..6: mod_base = OTHER; note = 2'-O-methyl ribonucleotide
  modified_base 7: mod_base = OTHER; note = 2'-fluoro ribonucleotide
  modified_base 8..11: mod_base = OTHER; note = 2'-O-methyl ribonucleotide
  modified_base 12: mod_base = OTHER; note = 2'-fluoro ribonucleotide
  modified_base 13: mod_base = OTHER; note = 2'-O-methyl ribonucleotide
  modified_base 14: mod_base = OTHER; note = 2'-fluoro ribonucleotide
  modified_base 15: mod_base = OTHER; note = 2'-O-methyl ribonucleotide
  modified_base 16: mod_base = OTHER; note = 2'-fluoro ribonucleotide
  modified_base 17..23: mod_base = OTHER; note = 2'-O-methyl ribonucleotide
  modified_base 1..3: mod_base = OTHER; note = phosphorothioate linkage
  modified_base 21..23: mod_base = OTHER; note = phosphorothioate linkage
tgaacctgtcaatcttctcagca

SEQ ID NO: 857 - RNA, 23 nt, synthetic construct
  source 1..23: mol_type = other RNA
  modified_base 1: mod_base = OTHER; note = 2'-O-methyl ribonucleotide
  modified_base 2: mod_base = OTHER; note = 2'-fluoro ribonucleotide
  modified_base 3..6: mod_base = OTHER; note = 2'-O-methyl ribonucleotide
  modified_base 7: mod_base = OTHER; note = 2'-fluoro ribonucleotide
  modified_base 8..11: mod_base = OTHER; note = 2'-O-methyl ribonucleotide
  modified_base 12: mod_base = OTHER; note = 2'-fluoro ribonucleotide
  modified_base 13: mod_base = OTHER; note = 2'-O-methyl ribonucleotide
  modified_base 14: mod_base = OTHER; note = 2'-fluoro ribonucleotide
  modified_base 15: mod_base = OTHER; note = 2'-O-methyl ribonucleotide
  modified_base 16: mod_base = OTHER; note = 2'-fluoro ribonucleotide
  modified_base 17..23: mod_base = OTHER; note = 2'-O-methyl ribonucleotide
  modified_base 1..3: mod_base = OTHER; note = phosphorothioate linkage
  modified_base 21..23: mod_base = OTHER; note = phosphorothioate linkage
ttgaacctgtcaatcttctcagc

SEQ ID NO: 858 - RNA, 23 nt, synthetic construct
  source 1..23: mol_type = other RNA
  modified_base 1: mod_base = OTHER; note = 2'-O-methyl ribonucleotide
  modified_base 2: mod_base = OTHER; note = 2'-fluoro ribonucleotide
  modified_base 3..6: mod_base = OTHER; note = 2'-O-methyl ribonucleotide
  modified_base 7: mod_base = OTHER; note = 2'-fluoro ribonucleotide
  modified_base 8..11: mod_base = OTHER; note = 2'-O-methyl ribonucleotide
  modified_base 12: mod_base = OTHER; note = 2'-fluoro ribonucleotide
  modified_base 13: mod_base = OTHER; note = 2'-O-methyl ribonucleotide
  modified_base 14: mod_base = OTHER; note = 2'-fluoro ribonucleotide
  modified_base 15: mod_base = OTHER; note = 2'-O-methyl ribonucleotide
  modified_base 16: mod_base = OTHER; note = 2'-fluoro ribonucleotide
  modified_base 17..23: mod_base = OTHER; note = 2'-O-methyl ribonucleotide
  modified_base 1..3: mod_base = OTHER; note = phosphorothioate linkage
  modified_base 21..23: mod_base = OTHER; note = phosphorothioate linkage
tatgaacctgtcaatcttctcag

SEQ ID NO: 859 - RNA, 23 nt, synthetic construct
  source 1..23: mol_type = other RNA
  modified_base 1: mod_base = OTHER; note = 2'-O-methyl ribonucleotide
  modified_base 2: mod_base = OTHER; note = 2'-fluoro ribonucleotide
  modified_base 3..6: mod_base = OTHER; note = 2'-O-methyl ribonucleotide
  modified_base 7: mod_base = OTHER; note = 2'-fluoro ribonucleotide
  modified_base 8..11: mod_base = OTHER; note = 2'-O-methyl ribonucleotide
  modified_base 12: mod_base = OTHER; note = 2'-fluoro ribonucleotide
  modified_base 13: mod_base = OTHER; note = 2'-O-methyl ribonucleotide
  modified_base 14: mod_base = OTHER; note = 2'-fluoro ribonucleotide
  modified_base 15: mod_base = OTHER; note = 2'-O-methyl ribonucleotide
  modified_base 16: mod_base = OTHER; note = 2'-fluoro ribonucleotide
  modified_base 17..23: mod_base = OTHER; note = 2'-O-methyl ribonucleotide
  modified_base 1..3: mod_base = OTHER; note = phosphorothioate linkage
  modified_base 21..23: mod_base = OTHER; note = phosphorothioate linkage
tagttttgctggaaagtgagacc

SEQ ID NO: 860 - RNA, 23 nt, synthetic construct
  source 1..23: mol_type = other RNA
  modified_base 1: mod_base = OTHER; note = 2'-O-methyl ribonucleotide
  modified_base 2: mod_base = OTHER; note = 2'-fluoro ribonucleotide
  modified_base 3..6: mod_base = OTHER; note = 2'-O-methyl ribonucleotide
  modified_base 7: mod_base = OTHER; note = 2'-fluoro ribonucleotide
  modified_base 8..11: mod_base = OTHER; note = 2'-O-methyl ribonucleotide
  modified_base 12: mod_base = OTHER; note = 2'-fluoro ribonucleotide
  modified_base 13: mod_base = OTHER; note = 2'-O-methyl ribonucleotide
  modified_base 14: mod_base = OTHER; note = 2'-fluoro ribonucleotide
  modified_base 15: mod_base = OTHER; note = 2'-O-methyl ribonucleotide
  modified_base 16: mod_base = OTHER; note = 2'-fluoro ribonucleotide
  modified_base 17..23: mod_base = OTHER; note = 2'-O-methyl ribonucleotide
  modified_base 1..3: mod_base = OTHER; note = phosphorothioate linkage
  modified_base 21..23: mod_base = OTHER; note = phosphorothioate linkage
tgagttttgctggaaagtgagac

SEQ ID NO: 861 - RNA, 23 nt, synthetic construct
  source 1..23: mol_type = other RNA
  modified_base 1: mod_base = OTHER; note = 2'-O-methyl ribonucleotide
  modified_base 2: mod_base = OTHER; note = 2'-fluoro ribonucleotide
  modified_base 3..6: mod_base = OTHER; note = 2'-O-methyl ribonucleotide
  modified_base 7: mod_base = OTHER; note = 2'-fluoro ribonucleotide
  modified_base 8..11: mod_base = OTHER; note = 2'-O-methyl ribonucleotide
  modified_base 12: mod_base = OTHER; note = 2'-fluoro ribonucleotide
  modified_base 13: mod_base = OTHER; note = 2'-O-methyl ribonucleotide
  modified_base 14: mod_base = OTHER; note = 2'-fluoro ribonucleotide
  modified_base 15: mod_base = OTHER; note = 2'-O-methyl ribonucleotide
  modified_base 16: mod_base = OTHER; note = 2'-fluoro ribonucleotide
  modified_base 17..23: mod_base = OTHER; note = 2'-O-methyl ribonucleotide
  modified_base 1..3: mod_base = OTHER; note = phosphorothioate linkage
  modified_base 21..23: mod_base = OTHER; note = phosphorothioate linkage
tagggagttttgctggaaagtga

SEQ ID NO: 862 - RNA, 23 nt, synthetic construct
  source 1..23: mol_type = other RNA
  modified_base 1: mod_base = OTHER; note = 2'-O-methyl ribonucleotide
  modified_base 2: mod_base = OTHER; note = 2'-fluoro ribonucleotide
  modified_base 3..6: mod_base = OTHER; note = 2'-O-methyl ribonucleotide
  modified_base 7: mod_base = OTHER; note = 2'-fluoro ribonucleotide
  modified_base 8..11: mod_base = OTHER; note = 2'-O-methyl ribonucleotide
  modified_base 12: mod_base = OTHER; note = 2'-fluoro ribonucleotide
  modified_base 13: mod_base = OTHER; note = 2'-O-methyl ribonucleotide
  modified_base 14: mod_base = OTHER; note = 2'-fluoro ribonucleotide
  modified_base 15: mod_base = OTHER; note = 2'-O-methyl ribonucleotide
  modified_base 16: mod_base = OTHER; note = 2'-fluoro ribonucleotide
  modified_base 17..23: mod_base = OTHER; note = 2'-O-methyl ribonucleotide
  modified_base 1..3: mod_base = OTHER; note = phosphorothioate linkage
  modified_base 21..23: mod_base = OTHER; note = phosphorothioate linkage
tttgagggagttttgctggaaag

SEQ ID NO: 863 - RNA, 23 nt, synthetic construct
  source 1..23: mol_type = other RNA
  modified_base 1: mod_base = OTHER; note = 2'-O-methyl ribonucleotide
  modified_base 2: mod_base = OTHER; note = 2'-fluoro ribonucleotide
  modified_base 3..6: mod_base = OTHER; note = 2'-O-methyl ribonucleotide
  modified_base 7: mod_base = OTHER; note = 2'-fluoro ribonucleotide
  modified_base 8..11: mod_base = OTHER; note = 2'-O-methyl ribonucleotide
  modified_base 12: mod_base = OTHER; note = 2'-fluoro ribonucleotide
  modified_base 13: mod_base = OTHER; note = 2'-O-methyl ribonucleotide
  modified_base 14: mod_base = OTHER; note = 2'-fluoro ribonucleotide
  modified_base 15: mod_base = OTHER; note = 2'-O-methyl ribonucleotide
  modified_base 16: mod_base = OTHER; note = 2'-fluoro ribonucleotide
  modified_base 17..23: mod_base = OTHER; note = 2'-O-methyl ribonucleotide
  modified_base 1..3: mod_base = OTHER; note = phosphorothioate linkage
  modified_base 21..23: mod_base = OTHER; note = phosphorothioate linkage
tgttgagggagttttgctggaaa

SEQ ID NO: 864 - RNA, 23 nt, synthetic construct
  source 1..23: mol_type = other RNA
  modified_base 1: mod_base = OTHER; note = 2'-O-methyl ribonucleotide
  modified_base 2: mod_base = OTHER; note = 2'-fluoro ribonucleotide
  modified_base 3..6: mod_base = OTHER; note = 2'-O-methyl ribonucleotide
  modified_base 7: mod_base = OTHER; note = 2'-fluoro ribonucleotide
  modified_base 8..11: mod_base = OTHER; note = 2'-O-methyl ribonucleotide
  modified_base 12: mod_base = OTHER; note = 2'-fluoro ribonucleotide
  modified_base 13: mod_base = OTHER; note = 2'-O-methyl ribonucleotide
  modified_base 14: mod_base = OTHER; note = 2'-fluoro ribonucleotide
  modified_base 15: mod_base = OTHER; note = 2'-O-methyl ribonucleotide
  modified_base 16: mod_base = OTHER; note = 2'-fluoro ribonucleotide
  modified_base 17..23: mod_base = OTHER; note = 2'-O-methyl ribonucleotide
  modified_base 1..3: mod_base = OTHER; note = phosphorothioate linkage
  modified_base 21..23: mod_base = OTHER; note = phosphorothioate linkage
tagttgagggagttttgctggaa

SEQ ID NO: 865 - RNA, 23 nt, synthetic construct
  source 1..23: mol_type = other RNA
  modified_base 1: mod_base = OTHER; note = 2'-O-methyl ribonucleotide
  modified_base 2: mod_base = OTHER; note = 2'-fluoro ribonucleotide
  modified_base 3..6: mod_base = OTHER; note = 2'-O-methyl ribonucleotide
  modified_base 7: mod_base = OTHER; note = 2'-fluoro ribonucleotide
  modified_base 8..11: mod_base = OTHER; note = 2'-O-methyl ribonucleotide
  modified_base 12: mod_base = OTHER; note = 2'-fluoro ribonucleotide
  modified_base 13: mod_base = OTHER; note = 2'-O-methyl ribonucleotide
  modified_base 14: mod_base = OTHER; note = 2'-fluoro ribonucleotide
  modified_base 15: mod_base = OTHER; note = 2'-O-methyl ribonucleotide
  modified_base 16: mod_base = OTHER; note = 2'-fluoro ribonucleotide
  modified_base 17..23: mod_base = OTHER; note = 2'-O-methyl ribonucleotide
  modified_base 1..3: mod_base = OTHER; note = phosphorothioate linkage
  modified_base 21..23: mod_base = OTHER; note = phosphorothioate linkage
tttcatccagttgagggagtttt

SEQ ID NO: 866 - RNA, 23 nt, synthetic construct
  source 1..23: mol_type = other RNA
  modified_base 1: mod_base = OTHER; note = 2'-O-methyl ribonucleotide
  modified_base 2: mod_base = OTHER; note = 2'-fluoro ribonucleotide
  modified_base 3..6: mod_base = OTHER; note = 2'-O-methyl ribonucleotide
  modified_base 7: mod_base = OTHER; note = 2'-fluoro ribonucleotide
  modified_base 8..11: mod_base = OTHER; note = 2'-O-methyl ribonucleotide
  modified_base 12: mod_base = OTHER; note = 2'-fluoro ribonucleotide
  modified_base 13: mod_base = OTHER; note = 2'-O-methyl ribonucleotide
  modified_base 14: mod_base = OTHER; note = 2'-fluoro ribonucleotide
  modified_base 15: mod_base = OTHER; note = 2'-O-methyl ribonucleotide
  modified_base 16: mod_base = OTHER; note = 2'-fluoro ribonucleotide
  modified_base 17..23: mod_base = OTHER; note = 2'-O-methyl ribonucleotide
  modified_base 1..3: mod_base = OTHER; note = phosphorothioate linkage
  modified_base 21..23: mod_base = OTHER; note = phosphorothioate linkage
ttcttcatccagttgagggagtt

SEQ ID NO: 867 - RNA, 23 nt, synthetic construct
  source 1..23: mol_type = other RNA
  modified_base 1: mod_base = OTHER; note = 2'-O-methyl ribonucleotide
  modified_base 2: mod_base = OTHER; note = 2'-fluoro ribonucleotide
  modified_base 3..6: mod_base = OTHER; note = 2'-O-methyl ribonucleotide
  modified_base 7: mod_base = OTHER; note = 2'-fluoro ribonucleotide
  modified_base 8..11: mod_base = OTHER; note = 2'-O-methyl ribonucleotide
  modified_base 12: mod_base = OTHER; note = 2'-fluoro ribonucleotide
  modified_base 13: mod_base = OTHER; note = 2'-O-methyl ribonucleotide
  modified_base 14: mod_base = OTHER; note = 2'-fluoro ribonucleotide
  modified_base 15: mod_base = OTHER; note = 2'-O-methyl ribonucleotide
  modified_base 16: mod_base = OTHER; note = 2'-fluoro ribonucleotide
  modified_base 17..23: mod_base = OTHER; note = 2'-O-methyl ribonucleotide
  modified_base 1..3: mod_base = OTHER; note = phosphorothioate linkage
  modified_base 21..23: mod_base = OTHER; note = phosphorothioate linkage
tgtttcttcatccagttgaggga

SEQ ID NO: 868 - RNA, 23 nt, synthetic construct
  source 1..23: mol_type = other RNA
  modified_base 1: mod_base = OTHER; note = 2'-O-methyl ribonucleotide
  modified_base 2: mod_base = OTHER; note = 2'-fluoro ribonucleotide
  modified_base 3..6: mod_base = OTHER; note = 2'-O-methyl ribonucleotide
  modified_base 7: mod_base = OTHER; note = 2'-fluoro ribonucleotide
  modified_base 8..11: mod_base = OTHER; note = 2'-O-methyl ribonucleotide
  modified_base 12: mod_base = OTHER; note = 2'-fluoro ribonucleotide
  modified_base 13: mod_base = OTHER; note = 2'-O-methyl ribonucleotide
  modified_base 14: mod_base = OTHER; note = 2'-fluoro ribonucleotide
  modified_base 15: mod_base = OTHER; note = 2'-O-methyl ribonucleotide
  modified_base 16: mod_base = OTHER; note = 2'-fluoro ribonucleotide
  modified_base 17..23: mod_base = OTHER; note = 2'-O-methyl ribonucleotide
  modified_base 1..3: mod_base = OTHER; note = phosphorothioate linkage
  modified_base 21..23: mod_base = OTHER; note = phosphorothioate linkage
tttttgcaggttcagctcggtgt

SEQ ID NO: 869 - RNA, 23 nt, synthetic construct
  source 1..23: mol_type = other RNA
  modified_base 1: mod_base = OTHER; note = 2'-O-methyl ribonucleotide
  modified_base 2: mod_base = OTHER; note = 2'-fluoro ribonucleotide
  modified_base 3..6: mod_base = OTHER; note = 2'-O-methyl ribonucleotide
  modified_base 7: mod_base = OTHER; note = 2'-fluoro ribonucleotide
  modified_base 8..11: mod_base = OTHER; note = 2'-O-methyl ribonucleotide
  modified_base 12: mod_base = OTHER; note = 2'-fluoro ribonucleotide
  modified_base 13: mod_base = OTHER; note = 2'-O-methyl ribonucleotide
  modified_base 14: mod_base = OTHER; note = 2'-fluoro ribonucleotide
  modified_base 15: mod_base = OTHER; note = 2'-O-methyl ribonucleotide
  modified_base 16: mod_base = OTHER; note = 2'-fluoro ribonucleotide
  modified_base 17..23: mod_base = OTHER; note = 2'-O-methyl ribonucleotide
  modified_base 1..3: mod_base = OTHER; note = phosphorothioate linkage
  modified_base 21..23: mod_base = OTHER; note = phosphorothioate linkage
tatttttgcaggttcagctcggt

SEQ ID NO: 870 - RNA, 23 nt, synthetic construct
  source 1..23: mol_type = other RNA
  modified_base 1: mod_base = OTHER; note = 2'-O-methyl ribonucleotide
  modified_base 2: mod_base = OTHER; note = 2'-fluoro ribonucleotide
  modified_base 3..6: mod_base = OTHER; note = 2'-O-methyl ribonucleotide
  modified_base 7: mod_base = OTHER; note = 2'-fluoro ribonucleotide
  modified_base 8..11: mod_base = OTHER; note = 2'-O-methyl ribonucleotide
  modified_base 12: mod_base = OTHER; note = 2'-fluoro ribonucleotide
  modified_base 13: mod_base = OTHER; note = 2'-O-methyl ribonucleotide
  modified_base 14: mod_base = OTHER; note = 2'-fluoro ribonucleotide
  modified_base 15: mod_base = OTHER; note = 2'-O-methyl ribonucleotide
  modified_base 16: mod_base = OTHER; note = 2'-fluoro ribonucleotide
  modified_base 17..23: mod_base = OTHER; note = 2'-O-methyl ribonucleotide
  modified_base 1..3: mod_base = OTHER; note = phosphorothioate linkage
  modified_base 21..23: mod_base = OTHER; note = phosphorothioate linkage
tcaatttttgcaggttcagctcg

SEQ ID NO: 871 - RNA, 23 nt, synthetic construct
  source 1..23: mol_type = other RNA
  modified_base 1: mod_base = OTHER; note = 2'-O-methyl ribonucleotide
  modified_base 2: mod_base = OTHER; note = 2'-fluoro ribonucleotide
  modified_base 3..6: mod_base = OTHER; note = 2'-O-methyl ribonucleotide
  modified_base 7: mod_base = OTHER; note = 2'-fluoro ribonucleotide
  modified_base 8..11: mod_base = OTHER; note = 2'-O-methyl ribonucleotide
  modified_base 12: mod_base = OTHER; note = 2'-fluoro ribonucleotide
  modified_base 13: mod_base = OTHER; note = 2'-O-methyl ribonucleotide
  modified_base 14: mod_base = OTHER; note = 2'-fluoro ribonucleotide
  modified_base 15: mod_base = OTHER; note = 2'-O-methyl ribonucleotide
  modified_base 16: mod_base = OTHER; note = 2'-fluoro ribonucleotide
  modified_base 17..23: mod_base = OTHER; note = 2'-O-methyl ribonucleotide
  modified_base 1..3: mod_base = OTHER; note = phosphorothioate linkage
  modified_base 21..23: mod_base = OTHER; note = phosphorothioate linkage
ttcaatttttgcaggttcagctc

SEQ ID NO: 872 - RNA, 23 nt, synthetic construct
  source 1..23: mol_type = other RNA
  modified_base 1: mod_base = OTHER; note = 2'-O-methyl ribonucleotide
  modified_base 2: mod_base = OTHER; note = 2'-fluoro ribonucleotide
  modified_base 3..6: mod_base = OTHER; note = 2'-O-methyl ribonucleotide
  modified_base 7: mod_base = OTHER; note = 2'-fluoro ribonucleotide
  modified_base 8..11: mod_base = OTHER; note = 2'-O-methyl ribonucleotide
  modified_base 12: mod_base = OTHER; note = 2'-fluoro ribonucleotide
  modified_base 13: mod_base = OTHER; note = 2'-O-methyl ribonucleotide
  modified_base 14: mod_base = OTHER; note = 2'-fluoro ribonucleotide
  modified_base 15: mod_base = OTHER; note = 2'-O-methyl ribonucleotide
  modified_base 16: mod_base = OTHER; note = 2'-fluoro ribonucleotide
  modified_base 17..23: mod_base = OTHER; note = 2'-O-methyl ribonucleotide
  modified_base 1..3: mod_base = OTHER; note = phosphorothioate linkage
  modified_base 21..23: mod_base = OTHER; note = phosphorothioate linkage
tctcaatttttgcaggttcagct

SEQ ID NO: 873 - RNA, 23 nt, synthetic construct
  source 1..23: mol_type = other RNA
  modified_base 1: mod_base = OTHER; note = 2'-O-methyl ribonucleotide
  modified_base 2: mod_base = OTHER; note = 2'-fluoro ribonucleotide
  modified_base 3..6: mod_base = OTHER; note = 2'-O-methyl ribonucleotide
  modified_base 7: mod_base = OTHER; note = 2'-fluoro ribonucleotide
  modified_base 8..11: mod_base = OTHER; note = 2'-O-methyl ribonucleotide
  modified_base 12: mod_base = OTHER; note = 2'-fluoro ribonucleotide
  modified_base 13: mod_base = OTHER; note = 2'-O-methyl ribonucleotide
  modified_base 14: mod_base = OTHER; note = 2'-fluoro ribonucleotide
  modified_base 15: mod_base = OTHER; note = 2'-O-methyl ribonucleotide
  modified_base 16: mod_base = OTHER; note = 2'-fluoro ribonucleotide
  modified_base 17..23: mod_base = OTHER; note = 2'-O-methyl ribonucleotide
  modified_base 1..3: mod_base = OTHER; note = phosphorothioate linkage
  modified_base 21..23: mod_base = OTHER; note = phosphorothioate linkage
tattgctcaatttttgcaggttc

SEQ ID NO: 874 - RNA, 23 nt, synthetic construct
  source 1..23: mol_type = other RNA
  modified_base 1: mod_base = OTHER; note = 2'-O-methyl ribonucleotide
  modified_base 2: mod_base = OTHER; note = 2'-fluoro ribonucleotide
  modified_base 3..6: mod_base = OTHER; note = 2'-O-methyl ribonucleotide
  modified_base 7: mod_base = OTHER; note = 2'-fluoro ribonucleotide
  modified_base 8..11: mod_base = OTHER; note = 2'-O-methyl ribonucleotide
  modified_base 12: mod_base = OTHER; note = 2'-fluoro ribonucleotide
  modified_base 13: mod_base = OTHER; note = 2'-O-methyl ribonucleotide
  modified_base 14: mod_base = OTHER; note = 2'-fluoro ribonucleotide
  modified_base 15: mod_base = OTHER; note = 2'-O-methyl ribonucleotide
  modified_base 16: mod_base = OTHER; note = 2'-fluoro ribonucleotide
  modified_base 17..23: mod_base = OTHER; note = 2'-O-methyl ribonucleotide
  modified_base 1..3: mod_base = OTHER; note = phosphorothioate linkage
  modified_base 21..23: mod_base = OTHER; note = phosphorothioate linkage
tttgggtagactctgtgggctct

SEQ ID NO: 875 - RNA, 23 nt, synthetic construct
  source 1..23: mol_type = other RNA
  modified_base 1: mod_base = OTHER; note = 2'-O-methyl ribonucleotide
  modified_base 2: mod_base = OTHER; note = 2'-fluoro ribonucleotide
  modified_base 3..6: mod_base = OTHER; note = 2'-O-methyl ribonucleotide
  modified_base 7: mod_base = OTHER; note = 2'-fluoro ribonucleotide
  modified_base 8..11: mod_base = OTHER; note = 2'-O-methyl ribonucleotide
  modified_base 12: mod_base = OTHER; note = 2'-fluoro ribonucleotide
  modified_base 13: mod_base = OTHER; note = 2'-O-methyl ribonucleotide
  modified_base 14: mod_base = OTHER; note = 2'-fluoro ribonucleotide
  modified_base 15: mod_base = OTHER; note = 2'-O-methyl ribonucleotide
  modified_base 16: mod_base = OTHER; note = 2'-fluoro ribonucleotide
  modified_base 17..23: mod_base = OTHER; note = 2'-O-methyl ribonucleotide
  modified_base 1..3: mod_base = OTHER; note = phosphorothioate linkage
  modified_base 21..23: mod_base = OTHER; note = phosphorothioate linkage
ttacacagcaaacaggaatgggc

SEQ ID NO: 876 - RNA, 23 nt, synthetic construct
  source 1..23: mol_type = other RNA
  modified_base 1: mod_base = OTHER; note = 2'-O-methyl ribonucleotide
  modified_base 2: mod_base = OTHER; note = 2'-fluoro ribonucleotide
  modified_base 3..6: mod_base = OTHER; note = 2'-O-methyl ribonucleotide
  modified_base 7: mod_base = OTHER; note = 2'-fluoro ribonucleotide
  modified_base 8..11: mod_base = OTHER; note = 2'-O-methyl ribonucleotide
  modified_base 12: mod_base = OTHER; note = 2'-fluoro ribonucleotide
  modified_base 13: mod_base = OTHER; note = 2'-O-methyl ribonucleotide
  modified_base 14: mod_base = OTHER; note = 2'-fluoro ribonucleotide
  modified_base 15: mod_base = OTHER; note = 2'-O-methyl ribonucleotide
  modified_base 16: mod_base = OTHER; note = 2'-fluoro ribonucleotide
  modified_base 17..23: mod_base = OTHER; note = 2'-O-methyl ribonucleotide
  modified_base 1..3: mod_base = OTHER; note = phosphorothioate linkage
  modified_base 21..23: mod_base = OTHER; note = phosphorothioate linkage
tcatacacagcaaacaggaatgg

SEQ ID NO: 877 - RNA, 23 nt, synthetic construct
  source 1..23: mol_type = other RNA
  modified_base 1: mod_base = OTHER; note = 2'-O-methyl ribonucleotide
  modified_base 2: mod_base = OTHER; note = 2'-fluoro ribonucleotide
  modified_base 3..6: mod_base = OTHER; note = 2'-O-methyl ribonucleotide
  modified_base 7: mod_base = OTHER; note = 2'-fluoro ribonucleotide
  modified_base 8..11: mod_base = OTHER; note = 2'-O-methyl ribonucleotide
  modified_base 12: mod_base = OTHER; note = 2'-fluoro ribonucleotide
  modified_base 13: mod_base = OTHER; note = 2'-O-methyl ribonucleotide
  modified_base 14: mod_base = OTHER; note = 2'-fluoro ribonucleotide
  modified_base 15: mod_base = OTHER; note = 2'-O-methyl ribonucleotide
  modified_base 16: mod_base = OTHER; note = 2'-fluoro ribonucleotide
  modified_base 17..23: mod_base = OTHER; note = 2'-O-methyl ribonucleotide
  modified_base 1..3: mod_base = OTHER; note = phosphorothioate linkage
  modified_base 21..23: mod_base = OTHER; note = phosphorothioate linkage
tgatcatacacagcaaacaggaa

SEQ ID NO: 878 - RNA, 23 nt, synthetic construct
  source 1..23: mol_type = other RNA
  modified_base 1: mod_base = OTHER; note = 2'-O-methyl ribonucleotide
  modified_base 2: mod_base = OTHER; note = 2'-fluoro ribonucleotide
  modified_base 3..6: mod_base = OTHER; note = 2'-O-methyl ribonucleotide
  modified_base 7: mod_base = OTHER; note = 2'-fluoro ribonucleotide
  modified_base 8..11: mod_base = OTHER; note = 2'-O-methyl ribonucleotide
  modified_base 12: mod_base = OTHER; note = 2'-fluoro ribonucleotide
  modified_base 13: mod_base = OTHER; note = 2'-O-methyl ribonucleotide
  modified_base 14: mod_base = OTHER; note = 2'-fluoro ribonucleotide
  modified_base 15: mod_base = OTHER; note = 2'-O-methyl ribonucleotide
  modified_base 16: mod_base = OTHER; note = 2'-fluoro ribonucleotide
  modified_base 17..23: mod_base = OTHER; note = 2'-O-methyl ribonucleotide
  modified_base 1..3: mod_base = OTHER; note = phosphorothioate linkage
  modified_base 21..23: mod_base = OTHER; note = phosphorothioate linkage
tttgatcatacacagcaaacagg

SEQ ID NO: 879 - RNA, 23 nt, synthetic construct
  source 1..23: mol_type = other RNA
  modified_base 1: mod_base = OTHER; note = 2'-O-methyl ribonucleotide
  modified_base 2: mod_base = OTHER; note = 2'-fluoro ribonucleotide
  modified_base 3..6: mod_base = OTHER; note = 2'-O-methyl ribonucleotide
  modified_base 7: mod_base = OTHER; note = 2'-fluoro ribonucleotide
  modified_base 8..11: mod_base = OTHER; note = 2'-O-methyl ribonucleotide
  modified_base 12: mod_base = OTHER; note = 2'-fluoro ribonucleotide
  modified_base 13: mod_base = OTHER; note = 2'-O-methyl ribonucleotide
  modified_base 14: mod_base = OTHER; note = 2'-fluoro ribonucleotide
  modified_base 15: mod_base = OTHER; note = 2'-O-methyl ribonucleotide
  modified_base 16: mod_base = OTHER; note = 2'-fluoro ribonucleotide
  modified_base 17..23: mod_base = OTHER; note = 2'-O-methyl ribonucleotide
  modified_base 1..3: mod_base = OTHER; note = phosphorothioate linkage
  modified_base 21..23: mod_base = OTHER; note = phosphorothioate linkage
tctttgatcatacacagcaaaca

SEQ ID NO: 880 - RNA, 23 nt, synthetic construct
  source 1..23: mol_type = other RNA
  modified_base 1: mod_base = OTHER; note = 2'-O-methyl ribonucleotide
  modified_base 2: mod_base = OTHER; note = 2'-fluoro ribonucleotide
  modified_base 3..6: mod_base = OTHER; note = 2'-O-methyl ribonucleotide
  modified_base 7: mod_base = OTHER; note = 2'-fluoro ribonucleotide
  modified_base 8..11: mod_base = OTHER; note = 2'-O-methyl ribonucleotide
  modified_base 12: mod_base = OTHER; note = 2'-fluoro ribonucleotide
  modified_base 13: mod_base = OTHER; note = 2'-O-methyl ribonucleotide
  modified_base 14: mod_base = OTHER; note = 2'-fluoro ribonucleotide
  modified_base 15: mod_base = OTHER; note = 2'-O-methyl ribonucleotide
  modified_base 16: mod_base = OTHER; note = 2'-fluoro ribonucleotide
  modified_base 17..23: mod_base = OTHER; note = 2'-O-methyl ribonucleotide
  modified_base 1..3: mod_base = OTHER; note = phosphorothioate linkage
  modified_base 21..23: mod_base = OTHER; note = phosphorothioate linkage
ttagaagaaaaggtgggagactg

SEQ ID NO: 881 - RNA, 23 nt, synthetic construct
  source 1..23: mol_type = other RNA
  modified_base 1: mod_base = OTHER; note = 2'-O-methyl ribonucleotide
  modified_base 2: mod_base = OTHER; note = 2'-fluoro ribonucleotide
  modified_base 3..6: mod_base = OTHER; note = 2'-O-methyl ribonucleotide
  modified_base 7: mod_base = OTHER; note = 2'-fluoro ribonucleotide
  modified_base 8..11: mod_base = OTHER; note = 2'-O-methyl ribonucleotide
  modified_base 12: mod_base = OTHER; note = 2'-fluoro ribonucleotide
  modified_base 13: mod_base = OTHER; note = 2'-O-methyl ribonucleotide
  modified_base 14: mod_base = OTHER; note = 2'-fluoro ribonucleotide
  modified_base 15: mod_base = OTHER; note = 2'-O-methyl ribonucleotide
  modified_base 16: mod_base = OTHER; note = 2'-fluoro ribonucleotide
  modified_base 17..23: mod_base = OTHER; note = 2'-O-methyl ribonucleotide
  modified_base 1..3: mod_base = OTHER; note = phosphorothioate linkage
  modified_base 21..23: mod_base = OTHER; note = phosphorothioate linkage
tttagaagaaaaggtgggagact

SEQ ID NO: 882 - RNA, 23 nt, synthetic construct
  source 1..23: mol_type = other RNA
  modified_base 1: mod_base = OTHER; note = 2'-O-methyl ribonucleotide
  modified_base 2: mod_base = OTHER; note = 2'-fluoro ribonucleotide
  modified_base 3..6: mod_base = OTHER; note = 2'-O-methyl ribonucleotide
  modified_base 7: mod_base = OTHER; note = 2'-fluoro ribonucleotide
  modified_base 8..11: mod_base = OTHER; note = 2'-O-methyl ribonucleotide
  modified_base 12: mod_base = OTHER; note = 2'-fluoro ribonucleotide
  modified_base 13: mod_base = OTHER; note = 2'-O-methyl ribonucleotide
  modified_base 14: mod_base = OTHER; note = 2'-fluoro ribonucleotide
  modified_base 15: mod_base = OTHER; note = 2'-O-methyl ribonucleotide
  modified_base 16: mod_base = OTHER; note = 2'-fluoro ribonucleotide
  modified_base 17..23: mod_base = OTHER; note = 2'-O-methyl ribonucleotide
  modified_base 1..3: mod_base = OTHER; note = phosphorothioate linkage
  modified_base 21..23: mod_base = OTHER; note = phosphorothioate linkage
ttcattagaagaaaaggtgggag

SEQ ID NO: 883 - RNA, 23 nt, synthetic construct
  source 1..23: mol_type = other RNA
  modified_base 1: mod_base = OTHER; note = 2'-O-methyl ribonucleotide
  modified_base 2: mod_base = OTHER; note = 2'-fluoro ribonucleotide
  modified_base 3..6: mod_base = OTHER; note = 2'-O-methyl ribonucleotide
  modified_base 7: mod_base = OTHER; note = 2'-fluoro ribonucleotide
  modified_base 8..11: mod_base = OTHER; note = 2'-O-methyl ribonucleotide
  modified_base 12: mod_base = OTHER; note = 2'-fluoro ribonucleotide
  modified_base 13: mod_base = OTHER; note = 2'-O-methyl ribonucleotide
  modified_base 14: mod_base = OTHER; note = 2'-fluoro ribonucleotide
  modified_base 15: mod_base = OTHER; note = 2'-O-methyl ribonucleotide
  modified_base 16: mod_base = OTHER; note = 2'-fluoro ribonucleotide
  modified_base 17..23: mod_base = OTHER; note = 2'-O-methyl ribonucleotide
  modified_base 1..3: mod_base = OTHER; note = phosphorothioate linkage
  modified_base 21..23: mod_base = OTHER; note = phosphorothioate linkage
tactcattagaagaaaaggtggg

SEQ ID NO: 884 - RNA, 23 nt, synthetic construct
  source 1..23: mol_type = other RNA
  modified_base 1: mod_base = OTHER; note = 2'-O-methyl ribonucleotide
  modified_base 2: mod_base = OTHER; note = 2'-fluoro ribonucleotide
  modified_base 3..6: mod_base = OTHER; note = 2'-O-methyl ribonucleotide
  modified_base 7: mod_base = OTHER; note = 2'-fluoro ribonucleotide
  modified_base 8..11: mod_base = OTHER; note = 2'-O-methyl ribonucleotide
  modified_base 12: mod_base = OTHER; note = 2'-fluoro ribonucleotide
  modified_base 13: mod_base = OTHER; note = 2'-O-methyl ribonucleotide
  modified_base 14: mod_base = OTHER; note = 2'-fluoro ribonucleotide
  modified_base 15: mod_base = OTHER; note = 2'-O-methyl ribonucleotide
  modified_base 16: mod_base = OTHER; note = 2'-fluoro ribonucleotide
  modified_base 17..23: mod_base = OTHER; note = 2'-O-methyl ribonucleotide
  modified_base 1..3: mod_base = OTHER; note = phosphorothioate linkage
  modified_base 21..23: mod_base = OTHER; note = phosphorothioate linkage
tagaccaaggagaaacggctgct

SEQ ID NO: 885 - RNA, 23 nt, synthetic construct
  source 1..23: mol_type = other RNA
  modified_base 1: mod_base = OTHER; note = 2'-O-methyl ribonucleotide
  modified_base 2: mod_base = OTHER; note = 2'-fluoro ribonucleotide
  modified_base 3..6: mod_base = OTHER; note = 2'-O-methyl ribonucleotide
  modified_base 7: mod_base = OTHER; note = 2'-fluoro ribonucleotide
  modified_base 8..11: mod_base = OTHER; note = 2'-O-methyl ribonucleotide
  modified_base 12: mod_base = OTHER; note = 2'-fluoro ribonucleotide
  modified_base 13: mod_base = OTHER; note = 2'-O-methyl ribonucleotide
  modified_base 14: mod_base = OTHER; note = 2'-fluoro ribonucleotide
  modified_base 15: mod_base = OTHER; note = 2'-O-methyl ribonucleotide
  modified_base 16: mod_base = OTHER; note = 2'-fluoro ribonucleotide
  modified_base 17..23: mod_base = OTHER; note = 2'-O-methyl ribonucleotide
  modified_base 1..3: mod_base = OTHER; note = phosphorothioate linkage
  modified_base 21..23: mod_base = OTHER; note = phosphorothioate linkage
taaacactggttcttgcctcccc

SEQ ID NO: 886 - RNA, 23 nt, synthetic construct
  source 1..23: mol_type = other RNA
  modified_base 1: mod_base = OTHER; note = 2'-O-methyl ribonucleotide
  modified_base 2: mod_base = OTHER; note = 2'-fluoro ribonucleotide
  modified_base 3..6: mod_base = OTHER; note = 2'-O-methyl ribonucleotide
  modified_base 7: mod_base = OTHER; note = 2'-fluoro ribonucleotide
  modified_base 8..11: mod_base = OTHER; note = 2'-O-methyl ribonucleotide
  modified_base 12: mod_base = OTHER; note = 2'-fluoro ribonucleotide
  modified_base 13: mod_base = OTHER; note = 2'-O-methyl ribonucleotide
  modified_base 14: mod_base = OTHER; note = 2'-fluoro ribonucleotide
  modified_base 15: mod_base = OTHER; note = 2'-O-methyl ribonucleotide
  modified_base 16: mod_base = OTHER; note = 2'-fluoro ribonucleotide
  modified_base 17..23: mod_base = OTHER; note = 2'-O-methyl ribonucleotide
  modified_base 1..3: mod_base = OTHER; note = phosphorothioate linkage
  modified_base 21..23: mod_base = OTHER; note = phosphorothioate linkage
ttaaacactggttcttgcctccc

SEQ ID NO: 887 - RNA, 23 nt, synthetic construct
  source 1..23: mol_type = other RNA
  modified_base 1: mod_base = OTHER; note = 2'-O-methyl ribonucleotide
  modified_base 2: mod_base = OTHER; note = 2'-fluoro ribonucleotide
  modified_base 3..6: mod_base = OTHER; note = 2'-O-methyl ribonucleotide
  modified_base 7: mod_base = OTHER; note = 2'-fluoro ribonucleotide
  modified_base 8..11: mod_base = OTHER; note = 2'-O-methyl ribonucleotide
  modified_base 12: mod_base = OTHER; note = 2'-fluoro ribonucleotide
  modified_base 13: mod_base = OTHER; note = 2'-O-methyl ribonucleotide
  modified_base 14: mod_base = OTHER; note = 2'-fluoro ribonucleotide
  modified_base 15: mod_base = OTHER; note = 2'-O-methyl ribonucleotide
  modified_base 16: mod_base = OTHER; note = 2'-fluoro ribonucleotide
  modified_base 17..23: mod_base = OTHER; note = 2'-O-methyl ribonucleotide
  modified_base 1..3: mod_base = OTHER; note = phosphorothioate linkage
  modified_base 21..23: mod_base = OTHER; note = phosphorothioate linkage
tctaaacactggttcttgcctcc

SEQ ID NO: 888 - RNA, 23 nt, synthetic construct
  source 1..23: mol_type = other RNA
  modified_base 1: mod_base = OTHER; note = 2'-O-methyl ribonucleotide
  modified_base 2: mod_base = OTHER; note = 2'-fluoro ribonucleotide
  modified_base 3..6: mod_base = OTHER; note = 2'-O-methyl ribonucleotide
  modified_base 7: mod_base = OTHER; note = 2'-fluoro ribonucleotide
  modified_base 8..11: mod_base = OTHER; note = 2'-O-methyl ribonucleotide
  modified_base 12: mod_base = OTHER; note = 2'-fluoro ribonucleotide
  modified_base 13: mod_base = OTHER; note = 2'-O-methyl ribonucleotide
  modified_base 14: mod_base = OTHER; note = 2'-fluoro ribonucleotide
  modified_base 15: mod_base = OTHER; note = 2'-O-methyl ribonucleotide
  modified_base 16: mod_base = OTHER; note = 2'-fluoro ribonucleotide
  modified_base 17..23: mod_base = OTHER; note = 2'-O-methyl ribonucleotide
  modified_base 1..3: mod_base = OTHER; note = phosphorothioate linkage
  modified_base 21..23: mod_base = OTHER; note = phosphorothioate linkage
tgctaaacactggttcttgcctc

SEQ ID NO: 889 - RNA, 23 nt, synthetic construct
  source 1..23: mol_type = other RNA
  modified_base 1: mod_base = OTHER; note = 2'-O-methyl ribonucleotide
  modified_base 2: mod_base = OTHER; note = 2'-fluoro ribonucleotide
  modified_base 3..6: mod_base = OTHER; note = 2'-O-methyl ribonucleotide
  modified_base 7: mod_base = OTHER; note = 2'-fluoro ribonucleotide
  modified_base 8..11: mod_base = OTHER; note = 2'-O-methyl ribonucleotide
  modified_base 12: mod_base = OTHER; note = 2'-fluoro ribonucleotide
  modified_base 13: mod_base = OTHER; note = 2'-O-methyl ribonucleotide
  modified_base 14: mod_base = OTHER; note = 2'-fluoro ribonucleotide
  modified_base 15: mod_base = OTHER; note = 2'-O-methyl ribonucleotide
  modified_base 16: mod_base = OTHER; note = 2'-fluoro ribonucleotide
  modified_base 17..23: mod_base = OTHER; note = 2'-O-methyl ribonucleotide
  modified_base 1..3: mod_base = OTHER; note = phosphorothioate linkage
  modified_base 21..23: mod_base = OTHER; note = phosphorothioate linkage
tgttggaattctttttggaacag

SEQ ID NO: 890 - RNA, 23 nt, synthetic construct
  source 1..23: mol_type = other RNA
  modified_base 1: mod_base = OTHER; note = 2'-O-methyl ribonucleotide
  modified_base 2: mod_base = OTHER; note = 2'-fluoro ribonucleotide
  modified_base 3..6: mod_base = OTHER; note = 2'-O-methyl ribonucleotide
  modified_base 7: mod_base = OTHER; note = 2'-fluoro ribonucleotide
  modified_base 8..11: mod_base = OTHER; note = 2'-O-methyl ribonucleotide
  modified_base 12: mod_base = OTHER; note = 2'-fluoro ribonucleotide
  modified_base 13: mod_base = OTHER; note = 2'-O-methyl ribonucleotide
  modified_base 14: mod_base = OTHER; note = 2'-fluoro ribonucleotide
  modified_base 15: mod_base = OTHER; note = 2'-O-methyl ribonucleotide
  modified_base 16: mod_base = OTHER; note = 2'-fluoro ribonucleotide
  modified_base 17..23: mod_base = OTHER; note = 2'-O-methyl ribonucleotide
  modified_base 1..3: mod_base = OTHER; note = phosphorothioate linkage
  modified_base 21..23: mod_base = OTHER; note = phosphorothioate linkage
tgtcggttggaattctttttgga

SEQ ID NO: 891 - RNA, 23 nt, synthetic construct
  source 1..23: mol_type = other RNA
  modified_base 1: mod_base = OTHER; note = 2'-O-methyl ribonucleotide
  modified_base 2: mod_base = OTHER; note = 2'-fluoro ribonucleotide
  modified_base 3..6: mod_base = OTHER; note = 2'-O-methyl ribonucleotide
  modified_base 7: mod_base = OTHER; note = 2'-fluoro ribonucleotide
  modified_base 8..11: mod_base = OTHER; note = 2'-O-methyl ribonucleotide
  modified_base 12: mod_base = OTHER; note = 2'-fluoro ribonucleotide
  modified_base 13: mod_base = OTHER; note = 2'-O-methyl ribonucleotide
  modified_base 14: mod_base = OTHER; note = 2'-fluoro ribonucleotide
  modified_base 15: mod_base = OTHER; note = 2'-O-methyl ribonucleotide
  modified_base 16: mod_base = OTHER; note = 2'-fluoro ribonucleotide
  modified_base 17..23: mod_base = OTHER; note = 2'-O-methyl ribonucleotide
  modified_base 1..3: mod_base = OTHER; note = phosphorothioate linkage
  modified_base 21..23: mod_base = OTHER; note = phosphorothioate linkage
taagctggtcggttggaattctt

SEQ ID NO: 892 - RNA, 23 nt, synthetic construct
  source 1..23: mol_type = other RNA
  modified_base 1: mod_base = OTHER; note = 2'-O-methyl ribonucleotide
  modified_base 2: mod_base = OTHER; note = 2'-fluoro ribonucleotide
  modified_base 3..6: mod_base = OTHER; note = 2'-O-methyl ribonucleotide
  modified_base 7: mod_base = OTHER; note = 2'-fluoro ribonucleotide
  modified_base 8..11: mod_base = OTHER; note = 2'-O-methyl ribonucleotide
  modified_base 12: mod_base = OTHER; note = 2'-fluoro ribonucleotide
  modified_base 13: mod_base = OTHER; note = 2'-O-methyl ribonucleotide
  modified_base 14: mod_base = OTHER; note = 2'-fluoro ribonucleotide
  modified_base 15: mod_base = OTHER; note = 2'-O-methyl ribonucleotide
  modified_base 16: mod_base = OTHER; note = 2'-fluoro ribonucleotide
  modified_base 17..23: mod_base = OTHER; note = 2'-O-methyl ribonucleotide
  modified_base 1..3: mod_base = OTHER; note = phosphorothioate linkage
  modified_base 21..23: mod_base = OTHER; note = phosphorothioate linkage
taaacaagctggtcggttggaat

SEQ ID NO: 893 - RNA, 23 nt, synthetic construct
  source 1..23: mol_type = other RNA
  modified_base 1: mod_base = OTHER; note = 2'-O-methyl ribonucleotide
  modified_base 2: mod_base = OTHER; note = 2'-fluoro ribonucleotide
  modified_base 3..6: mod_base = OTHER; note = 2'-O-methyl ribonucleotide
  modified_base 7: mod_base = OTHER; note = 2'-fluoro ribonucleotide
  modified_base 8..11: mod_base = OTHER; note = 2'-O-methyl ribonucleotide
  modified_base 12: mod_base = OTHER; note = 2'-fluoro ribonucleotide
  modified_base 13: mod_base = OTHER; note = 2'-O-methyl ribonucleotide
  modified_base 14: mod_base = OTHER; note = 2'-fluoro ribonucleotide
  modified_base 15: mod_base = OTHER; note = 2'-O-methyl ribonucleotide
  modified_base 16: mod_base = OTHER; note = 2'-fluoro ribonucleotide
  modified_base 17..23: mod_base = OTHER; note = 2'-O-methyl ribonucleotide
  modified_base 1..3: mod_base = OTHER; note = phosphorothioate linkage
  modified_base 21..23: mod_base = OTHER; note = phosphorothioate linkage
tttcacaaacaagctggtcggtt

SEQ ID NO: 894 - RNA, 23 nt, synthetic construct
  source 1..23: mol_type = other RNA
  modified_base 1: mod_base = OTHER; note = 2'-O-methyl ribonucleotide
  modified_base 2: mod_base = OTHER; note = 2'-fluoro ribonucleotide
  modified_base 3..6: mod_base = OTHER; note = 2'-O-methyl ribonucleotide
  modified_base 7: mod_base = OTHER; note = 2'-fluoro ribonucleotide
  modified_base 8..11: mod_base = OTHER; note = 2'-O-methyl ribonucleotide
  modified_base 12: mod_base = OTHER; note = 2'-fluoro ribonucleotide
  modified_base 13: mod_base = OTHER; note = 2'-O-methyl ribonucleotide
  modified_base 14: mod_base = OTHER; note = 2'-fluoro ribonucleotide
  modified_base 15: mod_base = OTHER; note = 2'-O-methyl ribonucleotide
  modified_base 16: mod_base = OTHER; note = 2'-fluoro ribonucleotide
  modified_base 17..23: mod_base = OTHER; note = 2'-O-methyl ribonucleotide
  modified_base 1..3: mod_base = OTHER; note = phosphorothioate linkage
  modified_base 21..23: mod_base = OTHER; note = phosphorothioate linkage
ttttcacaaacaagctggtcggt

SEQ ID NO: 895 - RNA, 23 nt, synthetic construct
  source 1..23: mol_type = other RNA
  modified_base 1: mod_base = OTHER; note = 2'-O-methyl ribonucleotide
  modified_base 2: mod_base = OTHER; note = 2'-fluoro ribonucleotide
  modified_base 3..6: mod_base = OTHER; note = 2'-O-methyl ribonucleotide
  modified_base 7: mod_base = OTHER; note = 2'-fluoro ribonucleotide
  modified_base 8..11: mod_base = OTHER; note = 2'-O-methyl ribonucleotide
  modified_base 12: mod_base = OTHER; note = 2'-fluoro ribonucleotide
  modified_base 13: mod_base = OTHER; note = 2'-O-methyl ribonucleotide
  modified_base 14: mod_base = OTHER; note = 2'-fluoro ribonucleotide
  modified_base 15: mod_base = OTHER; note = 2'-O-methyl ribonucleotide
  modified_base 16: mod_base = OTHER; note = 2'-fluoro ribonucleotide
  modified_base 17..23: mod_base = OTHER; note = 2'-O-methyl ribonucleotide
  modified_base 1..3: mod_base = OTHER; note = phosphorothioate linkage
  modified_base 21..23: mod_base = OTHER; note = phosphorothioate linkage
tgtttcacaaacaagctggtcgg

SEQ ID NO: 896 - RNA, 23 nt, synthetic construct
  source 1..23: mol_type = other RNA
  modified_base 1: mod_base = OTHER; note = 2'-O-methyl ribonucleotide
  modified_base 2: mod_base = OTHER; note = 2'-fluoro ribonucleotide
  modified_base 3..6: mod_base = OTHER; note = 2'-O-methyl ribonucleotide
  modified_base 7: mod_base = OTHER; note = 2'-fluoro ribonucleotide
  modified_base 8..11: mod_base = OTHER; note = 2'-O-methyl ribonucleotide
  modified_base 12: mod_base = OTHER; note = 2'-fluoro ribonucleotide
  modified_base 13: mod_base = OTHER; note = 2'-O-methyl ribonucleotide
  modified_base 14: mod_base = OTHER; note = 2'-fluoro ribonucleotide
  modified_base 15: mod_base = OTHER; note = 2'-O-methyl ribonucleotide
  modified_base 16: mod_base = OTHER; note = 2'-fluoro ribonucleotide
  modified_base 17..23: mod_base = OTHER; note = 2'-O-methyl ribonucleotide
  modified_base 1..3: mod_base = OTHER; note = phosphorothioate linkage
  modified_base 21..23: mod_base = OTHER; note = phosphorothioate linkage
ttgtttcacaaacaagctggtcg

SEQ ID NO: 897 - RNA, 21 nt, synthetic construct
  source 1..21: mol_type = other RNA
cctcgtcatccacaatgagaa

SEQ ID NO: 898 - RNA, 21 nt, synthetic construct
  source 1..21: mol_type = other RNA
ctcgtcatccacaatgagaga

SEQ ID NO: 899 - RNA, 21 nt, synthetic construct
  source 1..21: mol_type = other RNA
cgtcatccacaatgagagtaa

SEQ ID NO: 900 - RNA, 21 nt, synthetic construct
  source 1..21: mol_type = other RNA
gtcatccacaatgagagtaca

SEQ ID NO: 901 - RNA, 21 nt, synthetic construct
  source 1..21: mol_type = other RNA
catccacaatgagagtaccta

SEQ ID NO: 902 - RNA, 21 nt, synthetic construct
  source 1..21: mol_type = other RNA
atccacaatgagagtacctga

SEQ ID NO: 903 - RNA, 21 nt, synthetic construct
  source 1..21: mol_type = other RNA
ccacaatgagagtacctgtga

SEQ ID NO: 904 - RNA, 21 nt, synthetic construct
  source 1..21: mol_type = other RNA
cacaatgagagtacctgtgaa

SEQ ID NO: 905 - RNA, 21 nt, synthetic construct
  source 1..21: mol_type = other RNA
aatgagagtacctgtgagcaa

SEQ ID NO: 906 - RNA, 21 nt, synthetic construct
  source 1..21: mol_type = other RNA
tgacaccgaagacaagttgaa

SEQ ID NO: 907 - RNA, 21 nt, synthetic construct
  source 1..21: mol_type = other RNA
caacttcttgggcttccgtaa

SEQ ID NO: 908 - RNA, 21 nt, synthetic construct
  source 1..21: mol_type = other RNA
aacttcttgggcttccgtata

SEQ ID NO: 909 - RNA, 21 nt, synthetic construct
  source 1..21: mol_type = other RNA
cttcttgggcttccgtatata

SEQ ID NO: 910 - RNA, 21 nt, synthetic construct
  source 1..21: mol_type = other RNA
ttcttgggcttccgtatataa

SEQ ID NO: 911 - RNA, 21 nt, synthetic construct
  source 1..21: mol_type = other RNA
tcttgggcttccgtatatata

SEQ ID NO: 912 - RNA, 21 nt, synthetic construct
  source 1..21: mol_type = other RNA
cttgggcttccgtatatatga

SEQ ID NO: 913 - RNA, 21 nt, synthetic construct
  source 1..21: mol_type = other RNA
ttgggcttccgtatatatgga

SEQ ID NO: 914 - RNA, 21 nt, synthetic construct
  source 1..21: mol_type = other RNA
ggcttccgtatatatggcata

SEQ ID NO: 915 - RNA, 21 nt, synthetic construct
  source 1..21: mol_type = other RNA
ttccgtatatatggcatgcaa

SEQ ID NO: 916 - RNA, 21 nt, synthetic construct
  source 1..21: mol_type = other RNA
gtatatatggcatgcacagta

SEQ ID NO: 917 - RNA, 21 nt, synthetic construct
  source 1..21: mol_type = other RNA
tggcatgcacagtgagctata

SEQ ID NO: 918 - RNA, 21 nt, synthetic construct
  source 1..21: mol_type = other RNA
ttggaaggacaagaactgcaa

SEQ ID NO: 919 - RNA, 21 nt, synthetic construct
  source 1..21: mol_type = other RNA
gctgagaagattgacaggtta

SEQ ID NO: 920 - RNA, 21 nt, synthetic construct
  source 1..21: mol_type = other RNA
ctgagaagattgacaggttca

SEQ ID NO: 921 - RNA, 21 nt, synthetic construct
  source 1..21: mol_type = other RNA
tgagaagattgacaggttcaa

SEQ ID NO: 922 - RNA, 21 nt, synthetic construct
  source 1..21: mol_type = other RNA
gagaagattgacaggttcata

SEQ ID NO: 923 - RNA, 21 nt, synthetic construct
  source 1..21: mol_type = other RNA
tctcactttccagcaaaacta

SEQ ID NO: 924 - RNA, 21 nt, synthetic construct
  source 1..21: mol_type = other RNA
ctcactttccagcaaaactca

SEQ ID NO: 925 - RNA, 21 nt, synthetic construct
  source 1..21: mol_type = other RNA
actttccagcaaaactcccta

SEQ ID NO: 926 - RNA, 21 nt, synthetic construct
  source 1..21: mol_type = other RNA
ttccagcaaaactccctcaaa

SEQ ID NO: 927 - RNA, 21 nt, synthetic construct
  source 1..21: mol_type = other RNA
tccagcaaaactccctcaaca

SEQ ID NO: 928 - RNA, 21 nt, synthetic construct
  source 1..21: mol_type = other RNA
ccagcaaaactccctcaacta

SEQ ID NO: 929 - RNA, 21 nt, synthetic construct
  source 1..21: mol_type = other RNA
aactccctcaactggatgaaa

SEQ ID NO: 930 - RNA, 21 nt, synthetic construct
  source 1..21: mol_type = other RNA
ctccctcaactggatgaagaa

SEQ ID NO: 931 - RNA, 21 nt, synthetic construct
  source 1..21: mol_type = other RNA
cctcaactggatgaagaaaca

SEQ ID NO: 932 - RNA, 21 nt, synthetic construct
  source 1..21: mol_type = other RNA
accgagctgaacctgcaaaaa

SEQ ID NO: 933 - RNA, 21 nt, synthetic construct
  source 1..21: mol_type = other RNA
cgagctgaacctgcaaaaata

SEQ ID NO: 934 - RNA, 21 nt, synthetic construct
  source 1..21: mol_type = other RNA
agctgaacctgcaaaaattga

SEQ ID NO: 935 - RNA, 21 nt, synthetic construct
  source 1..21: mol_type = other RNA
gctgaacctgcaaaaattgaa

SEQ ID NO: 936 - RNA, 21 nt, synthetic construct
  source 1..21: mol_type = other RNA
ctgaacctgcaaaaattgaga

SEQ ID NO: 937 - RNA, 21 nt, synthetic construct
  source 1..21: mol_type = other RNA
acctgcaaaaattgagcaata

SEQ ID NO: 938 - RNA, 21 nt, synthetic construct
  source 1..21: mol_type = other RNA
agcccacagagtctacccaaa

SEQ ID NO: 939 - RNA, 21 nt, synthetic construct
  source 1..21: mol_type = other RNA
ccattcctgtttgctgtgtaa

SEQ ID NO: 940 - RNA, 21 nt, synthetic construct
  source 1..21: mol_type = other RNA
attcctgtttgctgtgtatga

SEQ ID NO: 941 - RNA, 21 nt, synthetic construct
  source 1..21: mol_type = other RNA
cctgtttgctgtgtatgatca

SEQ ID NO: 942 - RNA, 21 nt, synthetic construct
  source 1..21: mol_type = other RNA
tgtttgctgtgtatgatcaaa

SEQ ID NO: 943 - RNA, 21 nt, synthetic construct
  source 1..21: mol_type = other RNA
tttgctgtgtatgatcaaaga

SEQ ID NO: 944 - RNA, 21 nt, synthetic construct
  source 1..21: mol_type = other RNA
gtctcccaccttttcttctaa

SEQ ID NO: 945 - RNA, 21 nt, synthetic construct
  source 1..21: mol_type = other RNA
tctcccaccttttcttctaaa

SEQ ID NO: 946 - RNA, 21 nt, synthetic construct
  source 1..21: mol_type = other RNA
cccaccttttcttctaatgaa

SEQ ID NO: 947 - RNA, 21 nt, synthetic construct
  source 1..21: mol_type = other RNA
caccttttcttctaatgagta

SEQ ID NO: 948 - RNA, 21 nt, synthetic construct
  source 1..21: mol_type = other RNA
cagccgtttctccttggtcta

SEQ ID NO: 949 - RNA, 21 nt, synthetic construct
  source 1..21: mol_type = other RNA
ggaggcaagaaccagtgttta

SEQ ID NO: 950 - RNA, 21 nt, synthetic construct
  source 1..21: mol_type = other RNA
gaggcaagaaccagtgtttaa

SEQ ID NO: 951 - RNA, 21 nt, synthetic construct
  source 1..21: mol_type = other RNA
aggcaagaaccagtgtttaga

SEQ ID NO: 952 - RNA, 21 nt, synthetic construct
  source 1..21: mol_type = other RNA
ggcaagaaccagtgtttagca

SEQ ID NO: 953 - RNA, 21 nt, synthetic construct
  source 1..21: mol_type = other RNA
gttccaaaaagaattccaaca

SEQ ID NO: 954 - RNA, 21 nt, synthetic construct
  source 1..21: mol_type = other RNA
caaaaagaattccaaccgaca

SEQ ID NO: 955 - RNA, 21 nt, synthetic construct
  source 1..21: mol_type = other RNA
gaattccaaccgaccagctta

SEQ ID NO: 956 - RNA, 21 nt, synthetic construct
  source 1..21: mol_type = other RNA
tccaaccgaccagcttgttta

SEQ ID NO: 957 - RNA, 21 nt, synthetic construct
  source 1..21: mol_type = other RNA
ccgaccagcttgtttgtgaaa

SEQ ID NO: 958 - RNA, 21 nt, synthetic construct
  source 1..21: mol_type = other RNA
cgaccagcttgtttgtgaaaa

SEQ ID NO: 959 - RNA, 21 nt, synthetic construct
  source 1..21: mol_type = other RNA
gaccagcttgtttgtgaaaca

SEQ ID NO: 960 - RNA, 21 nt, synthetic construct
  source 1..21: mol_type = other RNA
accagcttgtttgtgaaacaa

SEQ ID NO: 961 - RNA, 21 nt, synthetic construct
  source 1..21: mol_type = other RNA
  modified_base 1..6: mod_base = OTHER; note = 2'-O-methyl ribonucleotide
  modified_base 7: mod_base = OTHER; note = 2'-fluoro ribonucleotide
  modified_base 8: mod_base = OTHER; note = 2'-O-methyl ribonucleotide
  modified_base 9: mod_base = OTHER; note = 2'-fluoro ribonucleotide
  modified_base 10: mod_base = OTHER; note = 2'-O-methyl ribonucleotide
  modified_base 11: mod_base = OTHER; note = 2'-fluoro ribonucleotide
  modified_base 12..21: mod_base = OTHER; note = 2'-O-methyl ribonucleotide
  modified_base 1..3: mod_base = OTHER; note = phosphorothioate linkage
cctcgtcatccacaatgagaa

SEQ ID NO: 962 - RNA, 21 nt, synthetic construct
  source 1..21: mol_type = other RNA
  modified_base 1..6: mod_base = OTHER; note = 2'-O-methyl ribonucleotide
  modified_base 7: mod_base = OTHER; note = 2'-fluoro ribonucleotide
  modified_base 8: mod_base = OTHER; note = 2'-O-methyl ribonucleotide
  modified_base 9: mod_base = OTHER; note = 2'-fluoro ribonucleotide
  modified_base 10: mod_base = OTHER; note = 2'-O-methyl ribonucleotide
  modified_base 11: mod_base = OTHER; note = 2'-fluoro ribonucleotide
  modified_base 12..21: mod_base = OTHER; note = 2'-O-methyl ribonucleotide
  modified_base 1..3: mod_base = OTHER; note = phosphorothioate linkage
ctcgtcatccacaatgagaga

SEQ ID NO: 963 - RNA, 21 nt, synthetic construct
  source 1..21: mol_type = other RNA
  modified_base 1..6: mod_base = OTHER; note = 2'-O-methyl ribonucleotide
  modified_base 7: mod_base = OTHER; note = 2'-fluoro ribonucleotide
  modified_base 8: mod_base = OTHER; note = 2'-O-methyl ribonucleotide
  modified_base 9: mod_base = OTHER; note = 2'-fluoro ribonucleotide
  modified_base 10: mod_base = OTHER; note = 2'-O-methyl ribonucleotide
  modified_base 11: mod_base = OTHER; note = 2'-fluoro ribonucleotide
  modified_base 12..21: mod_base = OTHER; note = 2'-O-methyl ribonucleotide
  modified_base 1..3: mod_base = OTHER; note = phosphorothioate linkage
cgtcatccacaatgagagtaa

SEQ ID NO: 964 - RNA, 21 nt, synthetic construct
  source 1..21: mol_type = other RNA
  modified_base 1..6: mod_base = OTHER; note = 2'-O-methyl ribonucleotide
  modified_base 7: mod_base = OTHER; note = 2'-fluoro ribonucleotide
  modified_base 8: mod_base = OTHER; note = 2'-O-methyl ribonucleotide
  modified_base 9: mod_base = OTHER; note = 2'-fluoro ribonucleotide
  modified_base 10: mod_base = OTHER; note = 2'-O-methyl ribonucleotide
  modified_base 11: mod_base = OTHER; note = 2'-fluoro ribonucleotide
  modified_base 12..21: mod_base = OTHER; note = 2'-O-methyl ribonucleotide
  modified_base 1..3: mod_base = OTHER; note = phosphorothioate linkage
gtcatccacaatgagagtaca

SEQ ID NO: 965 - RNA, 21 nt, synthetic construct
  source 1..21: mol_type = other RNA
  modified_base 1..6: mod_base = OTHER; note = 2'-O-methyl ribonucleotide
  modified_base 7: mod_base = OTHER; note = 2'-fluoro ribonucleotide
  modified_base 8: mod_base = OTHER; note = 2'-O-methyl ribonucleotide
  modified_base 9: mod_base = OTHER; note = 2'-fluoro ribonucleotide
  modified_base 10: mod_base = OTHER; note = 2'-O-methyl ribonucleotide
  modified_base 11: mod_base = OTHER; note = 2'-fluoro ribonucleotide
  modified_base 12..21: mod_base = OTHER; note = 2'-O-methyl ribonucleotide
  modified_base 1..3: mod_base = OTHER; note = phosphorothioate linkage
catccacaatgagagtaccta

SEQ ID NO: 966 - RNA, 21 nt, synthetic construct
  source 1..21: mol_type = other RNA
  modified_base 1..6: mod_base = OTHER; note = 2'-O-methyl ribonucleotide
  modified_base 7: mod_base = OTHER; note = 2'-fluoro ribonucleotide
  modified_base 8: mod_base = OTHER; note = 2'-O-methyl ribonucleotide
  modified_base 9: mod_base = OTHER; note = 2'-fluoro ribonucleotide
  modified_base 10: mod_base = OTHER; note = 2'-O-methyl ribonucleotide
  modified_base 11: mod_base = OTHER; note = 2'-fluoro ribonucleotide
  modified_base 12..21: mod_base = OTHER; note = 2'-O-methyl ribonucleotide
  modified_base 1..3: mod_base = OTHER; note = phosphorothioate linkage
atccacaatgagagtacctga

SEQ ID NO: 967 - RNA, 21 nt, synthetic construct
  source 1..21: mol_type = other RNA
  modified_base 1..6: mod_base = OTHER; note = 2'-O-methyl ribonucleotide
  modified_base 7: mod_base = OTHER; note = 2'-fluoro ribonucleotide
  modified_base 8: mod_base = OTHER; note = 2'-O-methyl ribonucleotide
  modified_base 9: mod_base = OTHER; note = 2'-fluoro ribonucleotide
  modified_base 10: mod_base = OTHER; note = 2'-O-methyl ribonucleotide
  modified_base 11: mod_base = OTHER; note = 2'-fluoro ribonucleotide
  modified_base 12..21: mod_base = OTHER; note = 2'-O-methyl ribonucleotide
  modified_base 1..3: mod_base = OTHER; note = phosphorothioate linkage
ccacaatgagagtacctgtga

SEQ ID NO: 968 - RNA, 21 nt, synthetic construct
  source 1..21: mol_type = other RNA
  modified_base 1..6: mod_base = OTHER; note = 2'-O-methyl ribonucleotide
  modified_base 7: mod_base = OTHER; note = 2'-fluoro ribonucleotide
  modified_base 8: mod_base = OTHER; note = 2'-O-methyl ribonucleotide
  modified_base 9: mod_base = OTHER; note = 2'-fluoro ribonucleotide
  modified_base 10: mod_base = OTHER; note = 2'-O-methyl ribonucleotide
  modified_base 11: mod_base = OTHER; note = 2'-fluoro ribonucleotide
  modified_base 12..21: mod_base = OTHER; note = 2'-O-methyl ribonucleotide
  modified_base 1..3: mod_base = OTHER; note = phosphorothioate linkage
cacaatgagagtacctgtgaa

SEQ ID NO: 969 - RNA, 21 nt, synthetic construct
  source 1..21: mol_type = other RNA
  modified_base 1..6: mod_base = OTHER; note = 2'-O-methyl ribonucleotide
  modified_base 7: mod_base = OTHER; note = 2'-fluoro ribonucleotide
  modified_base 8: mod_base = OTHER; note = 2'-O-methyl ribonucleotide
  modified_base 9: mod_base = OTHER; note = 2'-fluoro ribonucleotide
  modified_base 10: mod_base = OTHER; note = 2'-O-methyl ribonucleotide
  modified_base 11: mod_base = OTHER; note = 2'-fluoro ribonucleotide
  modified_base 12..21: mod_base = OTHER; note = 2'-O-methyl ribonucleotide
  modified_base 1..3: mod_base = OTHER; note = phosphorothioate linkage
aatgagagtacctgtgagcaa

SEQ ID NO: 970 - RNA, 21 nt, synthetic construct
  source 1..21: mol_type = other RNA
  modified_base 1..6: mod_base = OTHER; note = 2'-O-methyl ribonucleotide
  modified_base 7: mod_base = OTHER; note = 2'-fluoro ribonucleotide
  modified_base 8: mod_base = OTHER; note = 2'-O-methyl ribonucleotide
  modified_base 9: mod_base = OTHER; note = 2'-fluoro ribonucleotide
  modified_base 10: mod_base = OTHER; note = 2'-O-methyl ribonucleotide
  modified_base 11: mod_base = OTHER; note = 2'-fluoro ribonucleotide
  modified_base 12..21: mod_base = OTHER; note = 2'-O-methyl ribonucleotide
  modified_base 1..3: mod_base = OTHER; note = phosphorothioate linkage
tgacaccgaagacaagttgaa

SEQ ID NO: 971 - RNA, 21 nt, synthetic construct
  source 1..21: mol_type = other RNA
  modified_base 1..6: mod_base = OTHER; note = 2'-O-methyl ribonucleotide
  modified_base 7: mod_base = OTHER; note = 2'-fluoro ribonucleotide
  modified_base 8: mod_base = OTHER; note = 2'-O-methyl ribonucleotide
  modified_base 9: mod_base = OTHER; note = 2'-fluoro ribonucleotide
  modified_base 10: mod_base = OTHER; note = 2'-O-methyl ribonucleotide
  modified_base 11: mod_base = OTHER; note = 2'-fluoro ribonucleotide
  modified_base 12..21: mod_base = OTHER; note = 2'-O-methyl ribonucleotide
  modified_base 1..3: mod_base = OTHER; note = phosphorothioate linkage
caacttcttgggcttccgtaa

SEQ ID NO: 972 - RNA, 21 nt, synthetic construct
  source 1..21: mol_type = other RNA
  modified_base 1..6: mod_base = OTHER; note = 2'-O-methyl ribonucleotide
  modified_base 7: mod_base = OTHER; note = 2'-fluoro ribonucleotide
  modified_base 8: mod_base = OTHER; note = 2'-O-methyl ribonucleotide
  modified_base 9: mod_base = OTHER; note = 2'-fluoro ribonucleotide
  modified_base 10: mod_base = OTHER; note = 2'-O-methyl ribonucleotide
  modified_base 11: mod_base = OTHER; note = 2'-fluoro ribonucleotide
  modified_base 12..21: mod_base = OTHER; note = 2'-O-methyl ribonucleotide
  modified_base 1..3: mod_base = OTHER; note = phosphorothioate linkage
aacttcttgggcttccgtata

SEQ ID NO: 973 - RNA, 21 nt, synthetic construct
  source 1..21: mol_type = other RNA
  modified_base 1..6: mod_base = OTHER; note = 2'-O-methyl ribonucleotide
  modified_base 7: mod_base = OTHER; note = 2'-fluoro ribonucleotide
  modified_base 8: mod_base = OTHER; note = 2'-O-methyl ribonucleotide
  modified_base 9: mod_base = OTHER; note = 2'-fluoro ribonucleotide
  modified_base 10: mod_base = OTHER; note = 2'-O-methyl ribonucleotide
  modified_base 11: mod_base = OTHER; note = 2'-fluoro ribonucleotide
  modified_base 12..21: mod_base = OTHER; note = 2'-O-methyl ribonucleotide
  modified_base 1..3: mod_base = OTHER; note = phosphorothioate linkage
cttcttgggcttccgtatata

SEQ ID NO: 974 - RNA, 21 nt, synthetic construct
  source 1..21: mol_type = other RNA
  modified_base 1..6: mod_base = OTHER; note = 2'-O-methyl ribonucleotide
  modified_base 7: mod_base = OTHER; note = 2'-fluoro ribonucleotide
  modified_base 8: mod_base = OTHER; note = 2'-O-methyl ribonucleotide
  modified_base 9: mod_base = OTHER; note = 2'-fluoro ribonucleotide
  modified_base 10: mod_base = OTHER; note = 2'-O-methyl ribonucleotide
  modified_base 11: mod_base = OTHER; note = 2'-fluoro ribonucleotide
  modified_base 12..21: mod_base = OTHER; note = 2'-O-methyl ribonucleotide
  modified_base 1..3: mod_base = OTHER; note = phosphorothioate linkage
ttcttgggcttccgtatataa

SEQ ID NO: 975 - RNA, 21 nt, synthetic construct
  source 1..21: mol_type = other RNA
  modified_base 1..6: mod_base = OTHER; note = 2'-O-methyl ribonucleotide
  modified_base 7: mod_base = OTHER; note = 2'-fluoro ribonucleotide
  modified_base 8: mod_base = OTHER; note = 2'-O-methyl ribonucleotide
  modified_base 9: mod_base = OTHER; note = 2'-fluoro ribonucleotide
  modified_base 10: mod_base = OTHER; note = 2'-O-methyl ribonucleotide
  modified_base 11: mod_base = OTHER; note = 2'-fluoro ribonucleotide
  modified_base 12..21: mod_base = OTHER; note = 2'-O-methyl ribonucleotide
  modified_base 1..3: mod_base = OTHER; note = phosphorothioate linkage
tcttgggcttccgtatatata

SEQ ID NO: 976 - RNA, 21 nt, synthetic construct
  source 1..21: mol_type = other RNA
  modified_base 1..6: mod_base = OTHER; note = 2'-O-methyl ribonucleotide
  modified_base 7: mod_base = OTHER; note = 2'-fluoro ribonucleotide
  modified_base 8: mod_base = OTHER; note = 2'-O-methyl ribonucleotide
  modified_base 9: mod_base = OTHER; note = 2'-fluoro ribonucleotide
  modified_base 10: mod_base = OTHER; note = 2'-O-methyl ribonucleotide
  modified_base 11: mod_base = OTHER; note = 2'-fluoro ribonucleotide
  modified_base 12..21: mod_base = OTHER; note = 2'-O-methyl ribonucleotide
  modified_base 1..3: mod_base = OTHER; note = phosphorothioate linkage
cttgggcttccgtatatatga

SEQ ID NO: 977 - RNA, 21 nt, synthetic construct
  source 1..21: mol_type = other RNA
  modified_base 1..6: mod_base = OTHER; note = 2'-O-methyl ribonucleotide
  modified_base 7: mod_base = OTHER; note = 2'-fluoro ribonucleotide
  modified_base 8: mod_base = OTHER; note = 2'-O-methyl ribonucleotide
  modified_base 9: mod_base = OTHER; note = 2'-fluoro ribonucleotide
  modified_base 10: mod_base = OTHER; note = 2'-O-methyl ribonucleotide
  modified_base 11: mod_base = OTHER; note = 2'-fluoro ribonucleotide
  modified_base 12..21: mod_base = OTHER; note = 2'-O-methyl ribonucleotide
  modified_base 1..3: mod_base = OTHER; note = phosphorothioate linkage
ttgggcttccgtatatatgga

SEQ ID NO: 978 - RNA, 21 nt, synthetic construct
  source 1..21: mol_type = other RNA
  modified_base 1..6: mod_base = OTHER; note = 2'-O-methyl ribonucleotide
  modified_base 7: mod_base = OTHER; note = 2'-fluoro ribonucleotide
  modified_base 8: mod_base = OTHER; note = 2'-O-methyl ribonucleotide
  modified_base 9: mod_base = OTHER; note = 2'-fluoro ribonucleotide
  modified_base 10: mod_base = OTHER; note = 2'-O-methyl ribonucleotide
  modified_base 11: mod_base = OTHER; note = 2'-fluoro ribonucleotide
  modified_base 12..21: mod_base = OTHER; note = 2'-O-methyl ribonucleotide
  modified_base 1..3: mod_base = OTHER; note = phosphorothioate linkage
ggcttccgtatatatggcata

SEQ ID NO: 979 - RNA, 21 nt, synthetic construct
  source 1..21: mol_type = other RNA
  modified_base 1..6: mod_base = OTHER; note = 2'-O-methyl ribonucleotide
  modified_base 7: mod_base = OTHER; note = 2'-fluoro ribonucleotide
  modified_base 8: mod_base = OTHER; note = 2'-O-methyl ribonucleotide
  modified_base 9: mod_base = OTHER; note = 2'-fluoro ribonucleotide
  modified_base 10: mod_base = OTHER; note = 2'-O-methyl ribonucleotide
  modified_base 11: mod_base = OTHER; note = 2'-fluoro ribonucleotide
  modified_base 12..21: mod_base = OTHER; note = 2'-O-methyl ribonucleotide
  modified_base 1..3: mod_base = OTHER; note = phosphorothioate linkage
ttccgtatatatggcatgcaa

SEQ ID NO: 980 - RNA, 21 nt, synthetic construct
  source 1..21: mol_type = other RNA
  modified_base 1..6: mod_base = OTHER; note = 2'-O-methyl ribonucleotide
  modified_base 7: mod_base = OTHER; note = 2'-fluoro ribonucleotide
  modified_base 8: mod_base = OTHER; note = 2'-O-methyl ribonucleotide
  modified_base 9: mod_base = OTHER; note = 2'-fluoro ribonucleotide
  modified_base 10: mod_base = OTHER; note = 2'-O-methyl ribonucleotide
  modified_base 11: mod_base = OTHER; note = 2'-fluoro ribonucleotide
  modified_base 12..21: mod_base = OTHER; note = 2'-O-methyl ribonucleotide
  modified_base 1..3: mod_base = OTHER; note = phosphorothioate linkage
gtatatatggcatgcacagta

SEQ ID NO: 981 - RNA, 21 nt, synthetic construct
  source 1..21: mol_type = other RNA
  modified_base 1..6: mod_base = OTHER; note = 2'-O-methyl ribonucleotide
  modified_base 7: mod_base = OTHER; note = 2'-fluoro ribonucleotide
  modified_base 8: mod_base = OTHER; note = 2'-O-methyl ribonucleotide
  modified_base 9: mod_base = OTHER; note = 2'-fluoro ribonucleotide
  modified_base 10: mod_base = OTHER; note = 2'-O-methyl ribonucleotide
  modified_base 11: mod_base = OTHER; note = 2'-fluoro ribonucleotide
  modified_base 12..21: mod_base = OTHER; note = 2'-O-methyl ribonucleotide
  modified_base 1..3: mod_base = OTHER; note = phosphorothioate linkage
tggcatgcacagtgagctata

SEQ ID NO: 982 - RNA, 21 nt, synthetic construct
  source 1..21: mol_type = other RNA
  modified_base 1..6: mod_base = OTHER; note = 2'-O-methyl ribonucleotide
  modified_base 7: mod_base = OTHER; note = 2'-fluoro ribonucleotide
  modified_base 8: mod_base = OTHER; note = 2'-O-methyl ribonucleotide
  modified_base 9: mod_base = OTHER; note = 2'-fluoro ribonucleotide
  modified_base 10: mod_base = OTHER; note = 2'-O-methyl ribonucleotide
  modified_base 11: mod_base = OTHER; note = 2'-fluoro ribonucleotide
  modified_base 12..21: mod_base = OTHER; note = 2'-O-methyl ribonucleotide
  modified_base 1..3: mod_base = OTHER; note = phosphorothioate linkage
ttggaaggacaagaactgcaa

SEQ ID NO: 983 - RNA, 21 nt, synthetic construct
  source 1..21: mol_type = other RNA
  modified_base 1..6: mod_base = OTHER; note = 2'-O-methyl ribonucleotide
  modified_base 7: mod_base = OTHER; note = 2'-fluoro ribonucleotide
  modified_base 8: mod_base = OTHER; note = 2'-O-methyl ribonucleotide
  modified_base 9: mod_base = OTHER; note = 2'-fluoro ribonucleotide
  modified_base 10: mod_base = OTHER; note = 2'-O-methyl ribonucleotide
  modified_base 11: mod_base = OTHER; note = 2'-fluoro ribonucleotide
  modified_base 12..21: mod_base = OTHER; note = 2'-O-methyl ribonucleotide
  modified_base 1..3: mod_base = OTHER; note = phosphorothioate linkage
gctgagaagattgacaggtta

SEQ ID NO: 984 - RNA, 21 nt, synthetic construct
  source 1..21: mol_type = other RNA
  modified_base 1..6: mod_base = OTHER; note = 2'-O-methyl ribonucleotide
  modified_base 7: mod_base = OTHER; note = 2'-fluoro ribonucleotide
  modified_base 8: mod_base = OTHER; note = 2'-O-methyl ribonucleotide
  modified_base 9: mod_base = OTHER; note = 2'-fluoro ribonucleotide
  modified_base 10: mod_base = OTHER; note = 2'-O-methyl ribonucleotide
  modified_base 11: mod_base = OTHER; note = 2'-fluoro ribonucleotide
  modified_base 12..21: mod_base = OTHER; note = 2'-O-methyl ribonucleotide
  modified_base 1..3: mod_base = OTHER; note = phosphorothioate linkage
ctgagaagattgacaggttca

SEQ ID NO: 985 - RNA, 21 nt, synthetic construct
  source 1..21: mol_type = other RNA
  modified_base 1..6: mod_base = OTHER; note = 2'-O-methyl ribonucleotide
  modified_base 7: mod_base = OTHER; note = 2'-fluoro ribonucleotide
  modified_base 8: mod_base = OTHER; note = 2'-O-methyl ribonucleotide
  modified_base 9: mod_base = OTHER; note = 2'-fluoro ribonucleotide
  modified_base 10: mod_base = OTHER; note = 2'-O-methyl ribonucleotide
  modified_base 11: mod_base = OTHER; note = 2'-fluoro ribonucleotide
  modified_base 12..21: mod_base = OTHER; note = 2'-O-methyl ribonucleotide
  modified_base 1..3: mod_base = OTHER; note = phosphorothioate linkage
tgagaagattgacaggttcaa

SEQ ID NO: 986 - RNA, 21 nt, synthetic construct
  source 1..21: mol_type = other RNA
  modified_base 1..6: mod_base = OTHER; note = 2'-O-methyl ribonucleotide
  modified_base 7: mod_base = OTHER; note = 2'-fluoro ribonucleotide
  modified_base 8: mod_base = OTHER; note = 2'-O-methyl ribonucleotide
  modified_base 9: mod_base = OTHER; note = 2'-fluoro ribonucleotide
  modified_base 10: mod_base = OTHER; note = 2'-O-methyl ribonucleotide
  modified_base 11: mod_base = OTHER; note = 2'-fluoro ribonucleotide
  modified_base 12..21: mod_base = OTHER; note = 2'-O-methyl ribonucleotide
  modified_base 1..3: mod_base = OTHER; note = phosphorothioate linkage
gagaagattgacaggttcata

SEQ ID NO: 987 - RNA, 21 nt, synthetic construct
  source 1..21: mol_type = other RNA
  modified_base 1..6: mod_base = OTHER; note = 2'-O-methyl ribonucleotide
  modified_base 7: mod_base = OTHER; note = 2'-fluoro ribonucleotide
  modified_base 8: mod_base = OTHER; note = 2'-O-methyl ribonucleotide
  modified_base 9: mod_base = OTHER; note = 2'-fluoro ribonucleotide
  modified_base 10: mod_base = OTHER; note = 2'-O-methyl ribonucleotide
  modified_base 11: mod_base = OTHER; note = 2'-fluoro ribonucleotide
  modified_base 12..21: mod_base = OTHER; note = 2'-O-methyl ribonucleotide
  modified_base 1..3: mod_base = OTHER; note = phosphorothioate linkage
tctcactttccagcaaaacta

SEQ ID NO: 988 - RNA, 21 nt, synthetic construct
  source 1..21: mol_type = other RNA
  modified_base 1..6: mod_base = OTHER; note = 2'-O-methyl ribonucleotide
  modified_base 7: mod_base = OTHER; note = 2'-fluoro ribonucleotide
  modified_base 8: mod_base = OTHER; note = 2'-O-methyl ribonucleotide
  modified_base 9: mod_base = OTHER; note = 2'-fluoro ribonucleotide
  modified_base 10: mod_base = OTHER; note = 2'-O-methyl ribonucleotide
  modified_base 11: mod_base = OTHER; note = 2'-fluoro ribonucleotide
  modified_base 12..21: mod_base = OTHER; note = 2'-O-methyl ribonucleotide
  modified_base 1..3: mod_base = OTHER; note = phosphorothioate linkage
ctcactttccagcaaaactca

SEQ ID NO: 989 - RNA, 21 nt, synthetic construct
  source 1..21: mol_type = other RNA
  modified_base 1..6: mod_base = OTHER; note = 2'-O-methyl ribonucleotide
  modified_base 7: mod_base = OTHER; note = 2'-fluoro ribonucleotide
  modified_base 8: mod_base = OTHER; note = 2'-O-methyl ribonucleotide
  modified_base 9: mod_base = OTHER; note = 2'-fluoro ribonucleotide
  modified_base 10: mod_base = OTHER; note = 2'-O-methyl ribonucleotide
  modified_base 11: mod_base = OTHER; note = 2'-fluoro ribonucleotide
  modified_base 12..21: mod_base = OTHER; note = 2'-O-methyl ribonucleotide
  modified_base 1..3: mod_base = OTHER; note = phosphorothioate linkage
actttccagcaaaactcccta

SEQ ID NO: 990 - RNA, 21 nt, synthetic construct
  source 1..21: mol_type = other RNA
  modified_base 1..6: mod_base = OTHER; note = 2'-O-methyl ribonucleotide
  modified_base 7: mod_base = OTHER; note = 2'-fluoro ribonucleotide
  modified_base 8: mod_base = OTHER; note = 2'-O-methyl ribonucleotide
  modified_base 9: mod_base = OTHER; note = 2'-fluoro ribonucleotide
  modified_base 10: mod_base = OTHER; note = 2'-O-methyl ribonucleotide
  modified_base 11: mod_base = OTHER; note = 2'-fluoro ribonucleotide
  modified_base 12..21: mod_base = OTHER; note = 2'-O-methyl ribonucleotide
  modified_base 1..3: mod_base = OTHER; note = phosphorothioate linkage
ttccagcaaaactccctcaaa

SEQ ID NO: 991 - RNA, 21 nt, synthetic construct
  source 1..21: mol_type = other RNA
  modified_base 1..6: mod_base = OTHER; note = 2'-O-methyl ribonucleotide
  modified_base 7: mod_base = OTHER; note = 2'-fluoro ribonucleotide
  modified_base 8: mod_base = OTHER; note = 2'-O-methyl ribonucleotide
  modified_base 9: mod_base = OTHER; note = 2'-fluoro ribonucleotide
  modified_base 10: mod_base = OTHER; note = 2'-O-methyl ribonucleotide
  modified_base 11: mod_base = OTHER; note = 2'-fluoro ribonucleotide
  modified_base 12..21: mod_base = OTHER; note = 2'-O-methyl ribonucleotide
  modified_base 1..3: mod_base = OTHER; note = phosphorothioate linkage
tccagcaaaactccctcaaca

SEQ ID NO: 992 - RNA, 21 nt, synthetic construct
  source 1..21: mol_type = other RNA
  modified_base 1..6: mod_base = OTHER; note = 2'-O-methyl ribonucleotide
  modified_base 7: mod_base = OTHER; note = 2'-fluoro ribonucleotide
  modified_base 8: mod_base = OTHER; note = 2'-O-methyl ribonucleotide
  modified_base 9: mod_base = OTHER; note = 2'-fluoro ribonucleotide
  modified_base 10: mod_base = OTHER; note = 2'-O-methyl ribonucleotide
  modified_base 11: mod_base = OTHER; note = 2'-fluoro ribonucleotide
  modified_base 12..21: mod_base = OTHER; note = 2'-O-methyl ribonucleotide
  modified_base 1..3: mod_base = OTHER; note = phosphorothioate linkage
ccagcaaaactccctcaacta

SEQ ID NO: 993 - RNA, 21 nt, synthetic construct
  source 1..21: mol_type = other RNA
  modified_base 1..6: mod_base = OTHER; note = 2'-O-methyl ribonucleotide
  modified_base 7: mod_base = OTHER; note = 2'-fluoro ribonucleotide
  modified_base 8: mod_base = OTHER; note = 2'-O-methyl ribonucleotide
  modified_base 9: mod_base = OTHER; note = 2'-fluoro ribonucleotide
  modified_base 10: mod_base = OTHER; note = 2'-O-methyl ribonucleotide
  modified_base 11: mod_base = OTHER; note = 2'-fluoro ribonucleotide
  modified_base 12..21: mod_base = OTHER; note = 2'-O-methyl ribonucleotide
  modified_base 1..3: mod_base = OTHER; note = phosphorothioate linkage
aactccctcaactggatgaaa

SEQ ID NO: 994 - RNA, 21 nt, synthetic construct
  source 1..21: mol_type = other RNA
  modified_base 1..6: mod_base = OTHER; note = 2'-O-methyl ribonucleotide
  modified_base 7: mod_base = OTHER; note = 2'-fluoro ribonucleotide
  modified_base 8: mod_base = OTHER; note = 2'-O-methyl ribonucleotide
  modified_base 9: mod_base = OTHER; note = 2'-fluoro ribonucleotide
  modified_base 10: mod_base = OTHER; note = 2'-O-methyl ribonucleotide
  modified_base 11: mod_base = OTHER; note = 2'-fluoro ribonucleotide
  modified_base 12..21: mod_base = OTHER; note = 2'-O-methyl ribonucleotide
  modified_base 1..3: mod_base = OTHER; note = phosphorothioate linkage
ctccctcaactggatgaagaa

SEQ ID NO: 995 - RNA, 21 nt, synthetic construct
  source 1..21: mol_type = other RNA
  modified_base 1..6: mod_base = OTHER; note = 2'-O-methyl ribonucleotide
  modified_base 7: mod_base = OTHER; note = 2'-fluoro ribonucleotide
  modified_base 8: mod_base = OTHER; note = 2'-O-methyl ribonucleotide
  modified_base 9: mod_base = OTHER; note = 2'-fluoro ribonucleotide
  modified_base 10: mod_base = OTHER; note = 2'-O-methyl ribonucleotide
  modified_base 11: mod_base = OTHER; note = 2'-fluoro ribonucleotide
  modified_base 12..21: mod_base = OTHER; note = 2'-O-methyl ribonucleotide
  modified_base 1..3: mod_base = OTHER; note = phosphorothioate linkage
cctcaactggatgaagaaaca

SEQ ID NO: 996 - RNA, 21 nt, synthetic construct
  source 1..21: mol_type = other RNA
  modified_base 1..6: mod_base = OTHER; note = 2'-O-methyl ribonucleotide
  modified_base 7: mod_base = OTHER; note = 2'-fluoro ribonucleotide
  modified_base 8: mod_base = OTHER; note = 2'-O-methyl ribonucleotide
  modified_base 9: mod_base = OTHER; note = 2'-fluoro ribonucleotide
  modified_base 10: mod_base = OTHER; note = 2'-O-methyl ribonucleotide
  modified_base 11: mod_base = OTHER; note = 2'-fluoro ribonucleotide
  modified_base 12..21: mod_base = OTHER; note = 2'-O-methyl ribonucleotide
  modified_base 1..3: mod_base = OTHER; note = phosphorothioate linkage
accgagctgaacctgcaaaaa

SEQ ID NO: 997 - RNA, 21 nt, synthetic construct
  source 1..21: mol_type = other RNA
  modified_base 1..6: mod_base = OTHER; note = 2'-O-methyl ribonucleotide
  modified_base 7: mod_base = OTHER; note = 2'-fluoro ribonucleotide
  modified_base 8: mod_base = OTHER; note = 2'-O-methyl ribonucleotide
  modified_base 9: mod_base = OTHER; note = 2'-fluoro ribonucleotide
  modified_base 10: mod_base = OTHER; note = 2'-O-methyl ribonucleotide
  modified_base 11: mod_base = OTHER; note = 2'-fluoro ribonucleotide
  modified_base 12..21: mod_base = OTHER; note = 2'-O-methyl ribonucleotide
  modified_base 1..3: mod_base = OTHER; note = phosphorothioate linkage
cgagctgaacctgcaaaaata

SEQ ID NO: 998 - RNA, 21 nt, synthetic construct
  source 1..21: mol_type = other RNA
  modified_base 1..6: mod_base = OTHER; note = 2'-O-methyl ribonucleotide
  modified_base 7: mod_base = OTHER; note = 2'-fluoro ribonucleotide
  modified_base 8: mod_base = OTHER; note = 2'-O-methyl ribonucleotide
  modified_base 9: mod_base = OTHER; note = 2'-fluoro ribonucleotide
  modified_base 10: mod_base = OTHER; note = 2'-O-methyl ribonucleotide
  modified_base 11: mod_base = OTHER; note = 2'-fluoro ribonucleotide
  modified_base 12..21: mod_base = OTHER; note = 2'-O-methyl ribonucleotide
  modified_base 1..3: mod_base = OTHER; note = phosphorothioate linkage
agctgaacctgcaaaaattga

SEQ ID NO: 999 - RNA, 21 nt, synthetic construct
  source 1..21: mol_type = other RNA
  modified_base 1..6: mod_base = OTHER; note = 2'-O-methyl ribonucleotide
  modified_base 7: mod_base = OTHER; note = 2'-fluoro ribonucleotide
  modified_base 8: mod_base = OTHER; note = 2'-O-methyl ribonucleotide
  modified_base 9: mod_base = OTHER; note = 2'-fluoro ribonucleotide
  modified_base 10: mod_base = OTHER; note = 2'-O-methyl ribonucleotide
  modified_base 11: mod_base = OTHER; note = 2'-fluoro ribonucleotide
  modified_base 12..21: mod_base = OTHER; note = 2'-O-methyl ribonucleotide
  modified_base 1..3: mod_base = OTHER; note = phosphorothioate linkage
gctgaacctgcaaaaattgaa

SEQ ID NO: 1000 - RNA, 21 nt, synthetic construct
  source 1..21: mol_type = other RNA
  modified_base 1..6: mod_base = OTHER; note = 2'-O-methyl ribonucleotide
  modified_base 7: mod_base = OTHER; note = 2'-fluoro ribonucleotide
  modified_base 8: mod_base = OTHER; note = 2'-O-methyl ribonucleotide
  modified_base 9: mod_base = OTHER; note = 2'-fluoro ribonucleotide
  modified_base 10: mod_base = OTHER; note = 2'-O-methyl ribonucleotide
  modified_base 11: mod_base = OTHER; note = 2'-fluoro ribonucleotide
  modified_base 12..21: mod_base = OTHER; note = 2'-O-methyl ribonucleotide
  modified_base 1..3: mod_base = OTHER; note = phosphorothioate linkage
ctgaacctgcaaaaattgaga

SEQ ID NO: 1001 - RNA, 21 nt, synthetic construct
  source 1..21: mol_type = other RNA
  modified_base 1..6: mod_base = OTHER; note = 2'-O-methyl ribonucleotide
  modified_base 7: mod_base = OTHER; note = 2'-fluoro ribonucleotide
  modified_base 8: mod_base = OTHER; note = 2'-O-methyl ribonucleotide
  modified_base 9: mod_base = OTHER; note = 2'-fluoro ribonucleotide
  modified_base 10: mod_base = OTHER; note = 2'-O-methyl ribonucleotide
  modified_base 11: mod_base = OTHER; note = 2'-fluoro ribonucleotide
  modified_base 12..21: mod_base = OTHER; note = 2'-O-methyl ribonucleotide
  modified_base 1..3: mod_base = OTHER; note = phosphorothioate linkage
acctgcaaaaattgagcaata

SEQ ID NO: 1002 - RNA, 21 nt, synthetic construct
  source 1..21: mol_type = other RNA
  modified_base 1..6: mod_base = OTHER; note = 2'-O-methyl ribonucleotide
  modified_base 7: mod_base = OTHER; note = 2'-fluoro ribonucleotide
  modified_base 8: mod_base = OTHER; note = 2'-O-methyl ribonucleotide
  modified_base 9: mod_base = OTHER; note = 2'-fluoro ribonucleotide
  modified_base 10: mod_base = OTHER; note = 2'-O-methyl ribonucleotide
  modified_base 11: mod_base = OTHER; note = 2'-fluoro ribonucleotide
  modified_base 12..21: mod_base = OTHER; note = 2'-O-methyl ribonucleotide
  modified_base 1..3: mod_base = OTHER; note = phosphorothioate linkage
agcccacagagtctacccaaa

SEQ ID NO: 1003 - RNA, 21 nt, synthetic construct
  source 1..21: mol_type = other RNA
  modified_base 1..6: mod_base = OTHER; note = 2'-O-methyl ribonucleotide
  modified_base 7: mod_base = OTHER; note = 2'-fluoro ribonucleotide
  modified_base 8: mod_base = OTHER; note = 2'-O-methyl ribonucleotide
  modified_base 9: mod_base = OTHER; note = 2'-fluoro ribonucleotide
  modified_base 10: mod_base = OTHER; note = 2'-O-methyl ribonucleotide
  modified_base 11: mod_base = OTHER; note = 2'-fluoro ribonucleotide
  modified_base 12..21: mod_base = OTHER; note = 2'-O-methyl ribonucleotide
  modified_base 1..3: mod_base = OTHER; note = phosphorothioate linkage
ccattcctgtttgctgtgtaa

SEQ ID NO: 1004 - RNA, 21 nt, synthetic construct
  source 1..21: mol_type = other RNA
  modified_base 1..6: mod_base = OTHER; note = 2'-O-methyl ribonucleotide
  modified_base 7: mod_base = OTHER; note = 2'-fluoro ribonucleotide
  modified_base 8: mod_base = OTHER; note = 2'-O-methyl ribonucleotide
  modified_base 9: mod_base = OTHER; note = 2'-fluoro ribonucleotide
  modified_base 10: mod_base = OTHER; note = 2'-O-methyl ribonucleotide
  modified_base 11: mod_base = OTHER; note = 2'-fluoro ribonucleotide
  modified_base 12..21: mod_base = OTHER; note = 2'-O-methyl ribonucleotide
  modified_base 1..3: mod_base = OTHER; note = phosphorothioate linkage
attcctgtttgctgtgtatga

SEQ ID NO: 1005 - RNA, 21 nt, synthetic construct
  source 1..21: mol_type = other RNA
  modified_base 1..6: mod_base = OTHER; note = 2'-O-methyl ribonucleotide
  modified_base 7: mod_base = OTHER; note = 2'-fluoro ribonucleotide
  modified_base 8: mod_base = OTHER; note = 2'-O-methyl ribonucleotide
  modified_base 9: mod_base = OTHER; note = 2'-fluoro ribonucleotide
  modified_base 10: mod_base = OTHER; note = 2'-O-methyl ribonucleotide
  modified_base 11: mod_base = OTHER; note = 2'-fluoro ribonucleotide
  modified_base 12..21: mod_base = OTHER; note = 2'-O-methyl ribonucleotide
  modified_base 1..3: mod_base = OTHER; note = phosphorothioate linkage
cctgtttgctgtgtatgatca

SEQ ID NO: 1006 - RNA, 21 nt, synthetic construct
  source 1..21: mol_type = other RNA
  modified_base 1..6: mod_base = OTHER; note = 2'-O-methyl ribonucleotide
  modified_base 7: mod_base = OTHER; note = 2'-fluoro ribonucleotide
  modified_base 8: mod_base = OTHER; note = 2'-O-methyl ribonucleotide
  modified_base 9: mod_base = OTHER; note = 2'-fluoro ribonucleotide
  modified_base 10: mod_base = OTHER; note = 2'-O-methyl ribonucleotide
  modified_base 11: mod_base = OTHER; note = 2'-fluoro ribonucleotide
  modified_base 12..21: mod_base = OTHER; note = 2'-O-methyl ribonucleotide
  modified_base 1..3: mod_base = OTHER; note = phosphorothioate linkage
tgtttgctgtgtatgatcaaa

SEQ ID NO: 1007 - RNA, 21 nt, synthetic construct
  source 1..21: mol_type = other RNA
  modified_base 1..6: mod_base = OTHER; note = 2'-O-methyl ribonucleotide
  modified_base 7: mod_base = OTHER; note = 2'-fluoro ribonucleotide
  modified_base 8: mod_base = OTHER; note = 2'-O-methyl ribonucleotide
  modified_base 9: mod_base = OTHER; note = 2'-fluoro ribonucleotide
  modified_base 10: mod_base = OTHER; note = 2'-O-methyl ribonucleotide
  modified_base 11: mod_base = OTHER; note = 2'-fluoro ribonucleotide
  modified_base 12..21: mod_base = OTHER; note = 2'-O-methyl ribonucleotide
  modified_base 1..3: mod_base = OTHER; note = phosphorothioate linkage
tttgctgtgtatgatcaaaga

SEQ ID NO: 1008 - RNA, 21 nt, synthetic construct
  source 1..21: mol_type = other RNA
  modified_base 1..6: mod_base = OTHER; note = 2'-O-methyl ribonucleotide
  modified_base 7: mod_base = OTHER; note = 2'-fluoro ribonucleotide
  modified_base 8: mod_base = OTHER; note = 2'-O-methyl ribonucleotide
  modified_base 9: mod_base = OTHER; note = 2'-fluoro ribonucleotide
  modified_base 10: mod_base = OTHER; note = 2'-O-methyl ribonucleotide
  modified_base 11: mod_base = OTHER; note = 2'-fluoro ribonucleotide
  modified_base 12..21: mod_base = OTHER; note = 2'-O-methyl ribonucleotide
  modified_base 1..3: mod_base = OTHER; note = phosphorothioate linkage
gtctcccaccttttcttctaa

SEQ ID NO: 1009 - RNA, 21 nt, synthetic construct
  source 1..21: mol_type = other RNA
  modified_base 1..6: mod_base = OTHER; note = 2'-O-methyl ribonucleotide
  modified_base 7: mod_base = OTHER; note = 2'-fluoro ribonucleotide
  modified_base 8: mod_base = OTHER; note = 2'-O-methyl ribonucleotide
  modified_base 9: mod_base = OTHER; note = 2'-fluoro ribonucleotide
  modified_base 10: mod_base = OTHER; note = 2'-O-methyl ribonucleotide
  modified_base 11: mod_base = OTHER; note = 2'-fluoro ribonucleotide
  modified_base 12..21: mod_base = OTHER; note = 2'-O-methyl ribonucleotide
  modified_base 1..3: mod_base = OTHER; note = phosphorothioate linkage
tctcccaccttttcttctaaa

SEQ ID NO: 1010 - RNA, 21 nt, synthetic construct
  source 1..21: mol_type = other RNA
  modified_base 1..6: mod_base = OTHER; note = 2'-O-methyl ribonucleotide
  modified_base 7: mod_base = OTHER; note = 2'-fluoro ribonucleotide
  modified_base 8: mod_base = OTHER; note = 2'-O-methyl ribonucleotide
  modified_base 9: mod_base = OTHER; note = 2'-fluoro ribonucleotide
  modified_base 10: mod_base = OTHER; note = 2'-O-methyl ribonucleotide
  modified_base 11: mod_base = OTHER; note = 2'-fluoro ribonucleotide
  modified_base 12..21: mod_base = OTHER; note = 2'-O-methyl ribonucleotide
  modified_base 1..3: mod_base = OTHER; note = phosphorothioate linkage
cccaccttttcttctaatgaa

SEQ ID NO: 1011 - RNA, 21 nt, synthetic construct
  source 1..21: mol_type = other RNA
  modified_base 1..6: mod_base = OTHER; note = 2'-O-methyl ribonucleotide
  modified_base 7: mod_base = OTHER; note = 2'-fluoro ribonucleotide
  modified_base 8: mod_base = OTHER; note = 2'-O-methyl ribonucleotide
  modified_base 9: mod_base = OTHER; note = 2'-fluoro ribonucleotide
  modified_base 10: mod_base = OTHER; note = 2'-O-methyl ribonucleotide
  modified_base 11: mod_base = OTHER; note = 2'-fluoro ribonucleotide
  modified_base 12..21: mod_base = OTHER; note = 2'-O-methyl ribonucleotide
  modified_base 1..3: mod_base = OTHER; note = phosphorothioate linkage
caccttttcttctaatgagta

SEQ ID NO: 1012 - RNA, 21 nt, synthetic construct
  source 1..21: mol_type = other RNA
  modified_base 1..6: mod_base = OTHER; note = 2'-O-methyl ribonucleotide
  modified_base 7: mod_base = OTHER; note = 2'-fluoro ribonucleotide
  modified_base 8: mod_base = OTHER; note = 2'-O-methyl ribonucleotide
  modified_base 9: mod_base = OTHER; note = 2'-fluoro ribonucleotide
  modified_base 10: mod_base = OTHER; note = 2'-O-methyl ribonucleotide
  modified_base 11: mod_base = OTHER; note = 2'-fluoro ribonucleotide
  modified_base 12..21: mod_base = OTHER; note = 2'-O-methyl ribonucleotide
  modified_base 1..3: mod_base = OTHER; note = phosphorothioate linkage
cagccgtttctccttggtcta

SEQ ID NO: 1013 - RNA, 21 nt, synthetic construct
  source 1..21: mol_type = other RNA
  modified_base 1..6: mod_base = OTHER; note = 2'-O-methyl ribonucleotide
  modified_base 7: mod_base = OTHER; note = 2'-fluoro ribonucleotide
  modified_base 8: mod_base = OTHER; note = 2'-O-methyl ribonucleotide
  modified_base 9: mod_base = OTHER; note = 2'-fluoro ribonucleotide
  modified_base 10: mod_base = OTHER; note = 2'-O-methyl ribonucleotide
  modified_base 11: mod_base = OTHER; note = 2'-fluoro ribonucleotide
  modified_base 12..21: mod_base = OTHER; note = 2'-O-methyl ribonucleotide
  modified_base 1..3: mod_base = OTHER; note = phosphorothioate linkage
ggaggcaagaaccagtgttta

SEQ ID NO: 1014 - RNA, 21 nt, synthetic construct
  source 1..21: mol_type = other RNA
  modified_base 1..6: mod_base = OTHER; note = 2'-O-methyl ribonucleotide
  modified_base 7: mod_base = OTHER; note = 2'-fluoro ribonucleotide
  modified_base 8: mod_base = OTHER; note = 2'-O-methyl ribonucleotide
  modified_base 9: mod_base = OTHER; note = 2'-fluoro ribonucleotide
  modified_base 10: mod_base = OTHER; note = 2'-O-methyl ribonucleotide
  modified_base 11: mod_base = OTHER; note = 2'-fluoro ribonucleotide
  modified_base 12..21: mod_base = OTHER; note = 2'-O-methyl ribonucleotide
  modified_base 1..3: mod_base = OTHER; note = phosphorothioate linkage
gaggcaagaaccagtgtttaa

SEQ ID NO: 1015 - RNA, 21 nt, synthetic construct
  source 1..21: mol_type = other RNA
  modified_base 1..6: mod_base = OTHER; note = 2'-O-methyl ribonucleotide
  modified_base 7: mod_base = OTHER; note = 2'-fluoro ribonucleotide
  modified_base 8: mod_base = OTHER; note = 2'-O-methyl ribonucleotide
  modified_base 9: mod_base = OTHER; note = 2'-fluoro ribonucleotide
  modified_base 10: mod_base = OTHER; note = 2'-O-methyl ribonucleotide
  modified_base 11: mod_base = OTHER; note = 2'-fluoro ribonucleotide
  modified_base 12..21: mod_base = OTHER; note = 2'-O-methyl ribonucleotide
  modified_base 1..3: mod_base = OTHER; note = phosphorothioate linkage
aggcaagaaccagtgtttaga

SEQ ID NO: 1016 - RNA, 21 nt, synthetic construct
  source 1..21: mol_type = other RNA
  modified_base 1..6: mod_base = OTHER; note = 2'-O-methyl ribonucleotide
  modified_base 7: mod_base = OTHER; note = 2'-fluoro ribonucleotide
  modified_base 8: mod_base = OTHER; note = 2'-O-methyl ribonucleotide
  modified_base 9: mod_base = OTHER; note = 2'-fluoro ribonucleotide
  modified_base 10: mod_base = OTHER; note = 2'-O-methyl ribonucleotide
  modified_base 11: mod_base = OTHER; note = 2'-fluoro ribonucleotide
  modified_base 12..21: mod_base = OTHER; note = 2'-O-methyl ribonucleotide
  modified_base 1..3: mod_base = OTHER; note = phosphorothioate linkage
ggcaagaaccagtgtttagca

SEQ ID NO: 1017 - RNA, 21 nt, synthetic construct
  source 1..21: mol_type = other RNA
  modified_base 1..6: mod_base = OTHER; note = 2'-O-methyl ribonucleotide
  modified_base 7: mod_base = OTHER; note = 2'-fluoro ribonucleotide
  modified_base 8: mod_base = OTHER; note = 2'-O-methyl ribonucleotide
  modified_base 9: mod_base = OTHER; note = 2'-fluoro ribonucleotide
  modified_base 10: mod_base = OTHER; note = 2'-O-methyl ribonucleotide
  modified_base 11: mod_base = OTHER; note = 2'-fluoro ribonucleotide
  modified_base 12..21: mod_base = OTHER; note = 2'-O-methyl ribonucleotide
  modified_base 1..3: mod_base = OTHER; note = phosphorothioate linkage
gttccaaaaagaattccaaca

SEQ ID NO: 1018 - RNA, 21 nt, synthetic construct
  source 1..21: mol_type = other RNA
  modified_base 1..6: mod_base = OTHER; note = 2'-O-methyl ribonucleotide
  modified_base 7: mod_base = OTHER; note = 2'-fluoro ribonucleotide
  modified_base 8: mod_base = OTHER; note = 2'-O-methyl ribonucleotide
  modified_base 9: mod_base = OTHER; note = 2'-fluoro ribonucleotide
  modified_base 10: mod_base = OTHER; note = 2'-O-methyl ribonucleotide
  modified_base 11: mod_base = OTHER; note = 2'-fluoro ribonucleotide
  modified_base 12..21: mod_base = OTHER; note = 2'-O-methyl ribonucleotide
  modified_base 1..3: mod_base = OTHER; note = phosphorothioate linkage
caaaaagaattccaaccgaca

SEQ ID NO: 1019 - RNA, 21 nt, synthetic construct
  source 1..21: mol_type = other RNA
  modified_base 1..6: mod_base = OTHER; note = 2'-O-methyl ribonucleotide
  modified_base 7: mod_base = OTHER; note = 2'-fluoro ribonucleotide
  modified_base 8: mod_base = OTHER; note = 2'-O-methyl ribonucleotide
  modified_base 9: mod_base = OTHER; note = 2'-fluoro ribonucleotide
  modified_base 10: mod_base = OTHER; note = 2'-O-methyl ribonucleotide
  modified_base 11: mod_base = OTHER; note = 2'-fluoro ribonucleotide
  modified_base 12..21: mod_base = OTHER; note = 2'-O-methyl ribonucleotide
  modified_base 1..3: mod_base = OTHER; note = phosphorothioate linkage
gaattccaaccgaccagctta

SEQ ID NO: 1020 - RNA, 21 nt, synthetic construct
  source 1..21: mol_type = other RNA
  modified_base 1..6: mod_base = OTHER; note = 2'-O-methyl ribonucleotide
  modified_base 7: mod_base = OTHER; note = 2'-fluoro ribonucleotide
  modified_base 8: mod_base = OTHER; note = 2'-O-methyl ribonucleotide
  modified_base 9: mod_base = OTHER; note = 2'-fluoro ribonucleotide
  modified_base 10: mod_base = OTHER; note = 2'-O-methyl ribonucleotide
  modified_base 11: mod_base = OTHER; note = 2'-fluoro ribonucleotide
  modified_base 12..21: mod_base = OTHER; note = 2'-O-methyl ribonucleotide
  modified_base 1..3: mod_base = OTHER; note = phosphorothioate linkage
tccaaccgaccagcttgttta

SEQ ID NO: 1021 - RNA, 21 nt, synthetic construct
  source 1..21: mol_type = other RNA
  modified_base 1..6: mod_base = OTHER; note = 2'-O-methyl ribonucleotide
  modified_base 7: mod_base = OTHER; note = 2'-fluoro ribonucleotide
  modified_base 8: mod_base = OTHER; note = 2'-O-methyl ribonucleotide
  modified_base 9: mod_base = OTHER; note = 2'-fluoro ribonucleotide
  modified_base 10: mod_base = OTHER; note = 2'-O-methyl ribonucleotide
  modified_base 11: mod_base = OTHER; note = 2'-fluoro ribonucleotide
  modified_base 12..21: mod_base = OTHER; note = 2'-O-methyl ribonucleotide
  modified_base 1..3: mod_base = OTHER; note = phosphorothioate linkage
ccgaccagcttgtttgtgaaa

SEQ ID NO: 1022 - RNA, 21 nt, synthetic construct
  source 1..21: mol_type = other RNA
  modified_base 1..6: mod_base = OTHER; note = 2'-O-methyl ribonucleotide
  modified_base 7: mod_base = OTHER; note = 2'-fluoro ribonucleotide
  modified_base 8: mod_base = OTHER; note = 2'-O-methyl ribonucleotide
  modified_base 9: mod_base = OTHER; note = 2'-fluoro ribonucleotide
  modified_base 10: mod_base = OTHER; note = 2'-O-methyl ribonucleotide
  modified_base 11: mod_base = OTHER; note = 2'-fluoro ribonucleotide
  modified_base 12..21: mod_base = OTHER; note = 2'-O-methyl ribonucleotide
  modified_base 1..3: mod_base = OTHER; note = phosphorothioate linkage
cgaccagcttgtttgtgaaaa

SEQ ID NO: 1023 - RNA, 21 nt, synthetic construct
  source 1..21: mol_type = other RNA
  modified_base 1..6: mod_base = OTHER; note = 2'-O-methyl ribonucleotide
  modified_base 7: mod_base = OTHER; note = 2'-fluoro ribonucleotide
  modified_base 8: mod_base = OTHER; note = 2'-O-methyl ribonucleotide
  modified_base 9: mod_base = OTHER; note = 2'-fluoro ribonucleotide
  modified_base 10: mod_base = OTHER; note = 2'-O-methyl ribonucleotide
  modified_base 11: mod_base = OTHER; note = 2'-fluoro ribonucleotide
  modified_base 12..21: mod_base = OTHER; note = 2'-O-methyl ribonucleotide
  modified_base 1..3: mod_base = OTHER; note = phosphorothioate linkage
gaccagcttgtttgtgaaaca

SEQ ID NO: 1024 - RNA, 21 nt, synthetic construct
  source 1..21: mol_type = other RNA
  modified_base 1..6: mod_base = OTHER; note = 2'-O-methyl ribonucleotide
  modified_base 7: mod_base = OTHER; note = 2'-fluoro ribonucleotide
  modified_base 8: mod_base = OTHER; note = 2'-O-methyl ribonucleotide
  modified_base 9: mod_base = OTHER; note = 2'-fluoro ribonucleotide
  modified_base 10: mod_base = OTHER; note = 2'-O-methyl ribonucleotide
  modified_base 11: mod_base = OTHER; note = 2'-fluoro ribonucleotide
  modified_base 12..21: mod_base = OTHER; note = 2'-O-methyl ribonucleotide
  modified_base 1..3: mod_base = OTHER; note = phosphorothioate linkage
accagcttgtttgtgaaacaa

SEQ ID NO: 1025 - RNA, 23 nt, synthetic construct
  source 1..23: mol_type = other RNA
tatgccatatatacggaagccca

SEQ ID NO: 1026 - RNA, 23 nt, synthetic construct
  source 1..23: mol_type = other RNA
ttgaacctgtcaatcttctcagc

SEQ ID NO: 1027 - RNA, 23 nt, synthetic construct
  source 1..23: mol_type = other RNA
tatgaacctgtcaatcttctcag

SEQ ID NO: 1028 - RNA, 23 nt, synthetic construct
  source 1..23: mol_type = other RNA
tttgagggagttttgctggaaag

SEQ ID NO: 1029 - RNA, 23 nt, synthetic construct
  source 1..23: mol_type = other RNA
tgtttcttcatccagttgaggga

SEQ ID NO: 1030 - RNA, 23 nt, synthetic construct
  source 1..23: mol_type = other RNA
tatttttgcaggttcagctcggt

SEQ ID NO: 1031 - RNA, 23 nt, synthetic construct
  source 1..23: mol_type = other RNA
tattgctcaatttttgcaggttc

SEQ ID NO: 1032 - RNA, 23 nt, synthetic construct
  source 1..23: mol_type = other RNA
ttacacagcaaacaggaatgggc

SEQ ID NO: 1033 - RNA, 23 nt, synthetic construct
  source 1..23: mol_type = other RNA
tttgatcatacacagcaaacagg

SEQ ID NO: 1034 - RNA, 23 nt, synthetic construct
  source 1..23: mol_type = other RNA
taaacactggttcttgcctcccc

SEQ ID NO: 1035 - RNA, 23 nt, synthetic construct
  source 1..23: mol_type = other RNA
tgtcggttggaattctttttgga

SEQ ID NO: 1036 - RNA, 23 nt, synthetic construct
  source 1..23: mol_type = other RNA
ttttcacaaacaagctggtcggt

SEQ ID NO: 1037 - RNA, 23 nt, synthetic construct
  source 1..23: mol_type = other RNA
tgtttcacaaacaagctggtcgg

SEQ ID NO: 1038 - RNA, 23 nt, synthetic construct
  source 1..23: mol_type = other RNA
  modified_base 1: mod_base = OTHER; note = 2'-O-methyl ribonucleotide
  modified_base 2: mod_base = OTHER; note = 2'-fluoro ribonucleotide
  modified_base 3..6: mod_base = OTHER; note = 2'-O-methyl ribonucleotide
  modified_base 7: mod_base = OTHER; note = 2'-fluoro ribonucleotide
  modified_base 8..11: mod_base = OTHER; note = 2'-O-methyl ribonucleotide
  modified_base 12: mod_base = OTHER; note = 2'-fluoro ribonucleotide
  modified_base 13: mod_base = OTHER; note = 2'-O-methyl ribonucleotide
  modified_base 14: mod_base = OTHER; note = 2'-fluoro ribonucleotide
  modified_base 15: mod_base = OTHER; note = 2'-O-methyl ribonucleotide
  modified_base 16: mod_base = OTHER; note = 2'-fluoro ribonucleotide
  modified_base 17..23: mod_base = OTHER; note = 2'-O-methyl ribonucleotide
  modified_base 1..3: mod_base = OTHER; note = phosphorothioate linkage
  modified_base 21..23: mod_base = OTHER; note = phosphorothioate linkage
tatgccatatatacggaagccca

SEQ ID NO: 1039 - RNA, 23 nt, synthetic construct
  source 1..23: mol_type = other RNA
  modified_base 1: mod_base = OTHER; note = 2'-O-methyl ribonucleotide
  modified_base 2: mod_base = OTHER; note = 2'-fluoro ribonucleotide
  modified_base 3..6: mod_base = OTHER; note = 2'-O-methyl ribonucleotide
  modified_base 7: mod_base = OTHER; note = 2'-fluoro ribonucleotide
  modified_base 8..11: mod_base = OTHER; note = 2'-O-methyl ribonucleotide
  modified_base 12: mod_base = OTHER; note = 2'-fluoro ribonucleotide
  modified_base 13: mod_base = OTHER; note = 2'-O-methyl ribonucleotide
  modified_base 14: mod_base = OTHER; note = 2'-fluoro ribonucleotide
  modified_base 15: mod_base = OTHER; note = 2'-O-methyl ribonucleotide
  modified_base 16: mod_base = OTHER; note = 2'-fluoro ribonucleotide
  modified_base 17..23: mod_base = OTHER; note = 2'-O-methyl ribonucleotide
  modified_base 1..3: mod_base = OTHER; note = phosphorothioate linkage
  modified_base 21..23: mod_base = OTHER; note = phosphorothioate linkage
ttgaacctgtcaatcttctcagc

SEQ ID NO: 1040 - RNA, 23 nt, synthetic construct
  source 1..23: mol_type = other RNA
  modified_base 1: mod_base = OTHER; note = 2'-O-methyl ribonucleotide
  modified_base 2: mod_base = OTHER; note = 2'-fluoro ribonucleotide
  modified_base 3..6: mod_base = OTHER; note = 2'-O-methyl ribonucleotide
  modified_base 7: mod_base = OTHER; note = 2'-fluoro ribonucleotide
  modified_base 8..11: mod_base = OTHER; note = 2'-O-methyl ribonucleotide
  modified_base 12: mod_base = OTHER; note = 2'-fluoro ribonucleotide
  modified_base 13: mod_base = OTHER; note = 2'-O-methyl ribonucleotide
  modified_base 14: mod_base = OTHER; note = 2'-fluoro ribonucleotide
  modified_base 15: mod_base = OTHER; note = 2'-O-methyl ribonucleotide
  modified_base 16: mod_base = OTHER; note = 2'-fluoro ribonucleotide
  modified_base 17..23: mod_base = OTHER; note = 2'-O-methyl ribonucleotide
  modified_base 1..3: mod_base = OTHER; note = phosphorothioate linkage
  modified_base 21..23: mod_base = OTHER; note = phosphorothioate linkage
tatgaacctgtcaatcttctcag

SEQ ID NO: 1041 - RNA, 23 nt, synthetic construct
  source 1..23: mol_type = other RNA
  modified_base 1: mod_base = OTHER; note = 2'-O-methyl ribonucleotide
  modified_base 2: mod_base = OTHER; note = 2'-fluoro ribonucleotide
  modified_base 3..6: mod_base = OTHER; note = 2'-O-methyl ribonucleotide
  modified_base 7: mod_base = OTHER; note = 2'-fluoro ribonucleotide
  modified_base 8..11: mod_base = OTHER; note = 2'-O-methyl ribonucleotide
  modified_base 12: mod_base = OTHER; note = 2'-fluoro ribonucleotide
  modified_base 13: mod_base = OTHER; note = 2'-O-methyl ribonucleotide
  modified_base 14: mod_base = OTHER; note = 2'-fluoro ribonucleotide
  modified_base 15: mod_base = OTHER; note = 2'-O-methyl ribonucleotide
  modified_base 16: mod_base = OTHER; note = 2'-fluoro ribonucleotide
  modified_base 17..23: mod_base = OTHER; note = 2'-O-methyl ribonucleotide
  modified_base 1..3: mod_base = OTHER; note = phosphorothioate linkage
  modified_base 21..23: mod_base = OTHER; note = phosphorothioate linkage
tttgagggagttttgctggaaag

SEQ ID NO: 1042 - RNA, 23 nt, synthetic construct
  source 1..23: mol_type = other RNA
  modified_base 1: mod_base = OTHER; note = 2'-O-methyl ribonucleotide
  modified_base 2: mod_base = OTHER; note = 2'-fluoro ribonucleotide
  modified_base 3..6: mod_base = OTHER; note = 2'-O-methyl ribonucleotide
  modified_base 7: mod_base = OTHER; note = 2'-fluoro ribonucleotide
  modified_base 8..11: mod_base = OTHER; note = 2'-O-methyl ribonucleotide
  modified_base 12: mod_base = OTHER; note = 2'-fluoro ribonucleotide
  modified_base 13: mod_base = OTHER; note = 2'-O-methyl ribonucleotide
  modified_base 14: mod_base = OTHER; note = 2'-fluoro ribonucleotide
  modified_base 15: mod_base = OTHER; note = 2'-O-methyl ribonucleotide
  modified_base 16: mod_base = OTHER; note = 2'-fluoro ribonucleotide
  modified_base 17..23: mod_base = OTHER; note = 2'-O-methyl ribonucleotide
  modified_base 1..3: mod_base = OTHER; note = phosphorothioate linkage
  modified_base 21..23: mod_base = OTHER; note = phosphorothioate linkage
tgtttcttcatccagttgaggga

SEQ ID NO: 1043 - RNA, 23 nt, synthetic construct
  source 1..23: mol_type = other RNA
  modified_base 1: mod_base = OTHER; note = 2'-O-methyl ribonucleotide
  modified_base 2: mod_base = OTHER; note = 2'-fluoro ribonucleotide
  modified_base 3..6: mod_base = OTHER; note = 2'-O-methyl ribonucleotide
  modified_base 7: mod_base = OTHER; note = 2'-fluoro ribonucleotide
  modified_base 8..11: mod_base = OTHER; note = 2'-O-methyl ribonucleotide
  modified_base 12: mod_base = OTHER; note = 2'-fluoro ribonucleotide
  modified_base 13: mod_base = OTHER; note = 2'-O-methyl ribonucleotide
  modified_base 14: mod_base = OTHER; note = 2'-fluoro ribonucleotide
  modified_base 15: mod_base = OTHER; note = 2'-O-methyl ribonucleotide
  modified_base 16: mod_base = OTHER; note = 2'-fluoro ribonucleotide
  modified_base 17..23: mod_base = OTHER; note = 2'-O-methyl ribonucleotide
  modified_base 1..3: mod_base = OTHER; note = phosphorothioate linkage
  modified_base 21..23: mod_base = OTHER; note = phosphorothioate linkage
tatttttgcaggttcagctcggt

SEQ ID NO: 1044 - RNA, 23 nt, synthetic construct
  source 1..23: mol_type = other RNA
  modified_base 1: mod_base = OTHER; note = 2'-O-methyl ribonucleotide
  modified_base 2: mod_base = OTHER; note = 2'-fluoro ribonucleotide
  modified_base 3..6: mod_base = OTHER; note = 2'-O-methyl ribonucleotide
  modified_base 7: mod_base = OTHER; note = 2'-fluoro ribonucleotide
  modified_base 8..11: mod_base = OTHER; note = 2'-O-methyl ribonucleotide
  modified_base 12: mod_base = OTHER; note = 2'-fluoro ribonucleotide
  modified_base 13: mod_base = OTHER; note = 2'-O-methyl ribonucleotide
  modified_base 14: mod_base = OTHER; note = 2'-fluoro ribonucleotide
  modified_base 15: mod_base = OTHER; note = 2'-O-methyl ribonucleotide
  modified_base 16: mod_base = OTHER; note = 2'-fluoro ribonucleotide
  modified_base 17..23: mod_base = OTHER; note = 2'-O-methyl ribonucleotide
  modified_base 1..3: mod_base = OTHER; note = phosphorothioate linkage
  modified_base 21..23: mod_base = OTHER; note = phosphorothioate linkage
tattgctcaatttttgcaggttc

SEQ ID NO: 1045 - RNA, 23 nt, synthetic construct
  source 1..23: mol_type = other RNA
  modified_base 1: mod_base = OTHER; note = 2'-O-methyl ribonucleotide
  modified_base 2: mod_base = OTHER; note = 2'-fluoro ribonucleotide
  modified_base 3..6: mod_base = OTHER; note = 2'-O-methyl ribonucleotide
  modified_base 7: mod_base = OTHER; note = 2'-fluoro ribonucleotide
  modified_base 8..11: mod_base = OTHER; note = 2'-O-methyl ribonucleotide
  modified_base 12: mod_base = OTHER; note = 2'-fluoro ribonucleotide
  modified_base 13: mod_base = OTHER; note = 2'-O-methyl ribonucleotide
  modified_base 14: mod_base = OTHER; note = 2'-fluoro ribonucleotide
  modified_base 15: mod_base = OTHER; note = 2'-O-methyl ribonucleotide
  modified_base 16: mod_base = OTHER; note = 2'-fluoro ribonucleotide
  modified_base 17..23: mod_base = OTHER; note = 2'-O-methyl ribonucleotide
  modified_base 1..3: mod_base = OTHER; note = phosphorothioate linkage
  modified_base 21..23: mod_base = OTHER; note = phosphorothioate linkage
ttacacagcaaacaggaatgggc

SEQ ID NO: 1046 - RNA, 23 nt, synthetic construct
  source 1..23: mol_type = other RNA
  modified_base 1: mod_base = OTHER; note = 2'-O-methyl ribonucleotide
  modified_base 2: mod_base = OTHER; note = 2'-fluoro ribonucleotide
  modified_base 3..6: mod_base = OTHER; note = 2'-O-methyl ribonucleotide
  modified_base 7: mod_base = OTHER; note = 2'-fluoro ribonucleotide
  modified_base 8..11: mod_base = OTHER; note = 2'-O-methyl ribonucleotide
  modified_base 12: mod_base = OTHER; note = 2'-fluoro ribonucleotide
  modified_base 13: mod_base = OTHER; note = 2'-O-methyl ribonucleotide
  modified_base 14: mod_base = OTHER; note = 2'-fluoro ribonucleotide
  modified_base 15: mod_base = OTHER; note = 2'-O-methyl ribonucleotide
  modified_base 16: mod_base = OTHER; note = 2'-fluoro ribonucleotide
  modified_base 17..23: mod_base = OTHER; note = 2'-O-methyl ribonucleotide
  modified_base 1..3: mod_base = OTHER; note = phosphorothioate linkage
  modified_base 21..23: mod_base = OTHER; note = phosphorothioate linkage
tttgatcatacacagcaaacagg

SEQ ID NO: 1047 - RNA, 23 nt, synthetic construct
  source 1..23: mol_type = other RNA
  modified_base 1: mod_base = OTHER; note = 2'-O-methyl ribonucleotide
  modified_base 2: mod_base = OTHER; note = 2'-fluoro ribonucleotide
  modified_base 3..6: mod_base = OTHER; note = 2'-O-methyl ribonucleotide
  modified_base 7: mod_base = OTHER; note = 2'-fluoro ribonucleotide
  modified_base 8..11: mod_base = OTHER; note = 2'-O-methyl ribonucleotide
  modified_base 12: mod_base = OTHER; note = 2'-fluoro ribonucleotide
  modified_base 13: mod_base = OTHER; note = 2'-O-methyl ribonucleotide
  modified_base 14: mod_base = OTHER; note = 2'-fluoro ribonucleotide
  modified_base 15: mod_base = OTHER; note = 2'-O-methyl ribonucleotide
  modified_base 16: mod_base = OTHER; note = 2'-fluoro ribonucleotide
  modified_base 17..23: mod_base = OTHER; note = 2'-O-methyl ribonucleotide
  modified_base 1..3: mod_base = OTHER; note = phosphorothioate linkage
  modified_base 21..23: mod_base = OTHER; note = phosphorothioate linkage
taaacactggttcttgcctcccc

SEQ ID NO: 1048 - RNA, 23 nt, synthetic construct
  source 1..23: mol_type = other RNA
  modified_base 1: mod_base = OTHER; note = 2'-O-methyl ribonucleotide
  modified_base 2: mod_base = OTHER; note = 2'-fluoro ribonucleotide
  modified_base 3..6: mod_base = OTHER; note = 2'-O-methyl ribonucleotide
  modified_base 7: mod_base = OTHER; note = 2'-fluoro ribonucleotide
  modified_base 8..11: mod_base = OTHER; note = 2'-O-methyl ribonucleotide
  modified_base 12: mod_base = OTHER; note = 2'-fluoro ribonucleotide
  modified_base 13: mod_base = OTHER; note = 2'-O-methyl ribonucleotide
  modified_base 14: mod_base = OTHER; note = 2'-fluoro ribonucleotide
  modified_base 15: mod_base = OTHER; note = 2'-O-methyl ribonucleotide
  modified_base 16: mod_base = OTHER; note = 2'-fluoro ribonucleotide
  modified_base 17..23: mod_base = OTHER; note = 2'-O-methyl ribonucleotide
  modified_base 1..3: mod_base = OTHER; note = phosphorothioate linkage
  modified_base 21..23: mod_base = OTHER; note = phosphorothioate linkage
tgtcggttggaattctttttgga

SEQ ID NO: 1049 - RNA, 23 nt, synthetic construct
  source 1..23: mol_type = other RNA
  modified_base 1: mod_base = OTHER; note = 2'-O-methyl ribonucleotide
  modified_base 2: mod_base = OTHER; note = 2'-fluoro ribonucleotide
  modified_base 3..6: mod_base = OTHER; note = 2'-O-methyl ribonucleotide
  modified_base 7: mod_base = OTHER; note = 2'-fluoro ribonucleotide
  modified_base 8..11: mod_base = OTHER; note = 2'-O-methyl ribonucleotide
  modified_base 12: mod_base = OTHER; note = 2'-fluoro ribonucleotide
  modified_base 13: mod_base = OTHER; note = 2'-O-methyl ribonucleotide
  modified_base 14: mod_base = OTHER; note = 2'-fluoro ribonucleotide
  modified_base 15: mod_base = OTHER; note = 2'-O-methyl ribonucleotide
  modified_base 16: mod_base = OTHER; note = 2'-fluoro ribonucleotide
  modified_base 17..23: mod_base = OTHER; note = 2'-O-methyl ribonucleotide
  modified_base 1..3: mod_base = OTHER; note = phosphorothioate linkage
  modified_base 21..23: mod_base = OTHER; note = phosphorothioate linkage
ttttcacaaacaagctggtcggt

SEQ ID NO: 1050 - RNA, 23 nt, synthetic construct
  source 1..23: mol_type = other RNA
  modified_base 1: mod_base = OTHER; note = 2'-O-methyl ribonucleotide
  modified_base 2: mod_base = OTHER; note = 2'-fluoro ribonucleotide
  modified_base 3..6: mod_base = OTHER; note = 2'-O-methyl ribonucleotide
  modified_base 7: mod_base = OTHER; note = 2'-fluoro ribonucleotide
  modified_base 8..11: mod_base = OTHER; note = 2'-O-methyl ribonucleotide
  modified_base 12: mod_base = OTHER; note = 2'-fluoro ribonucleotide
  modified_base 13: mod_base = OTHER; note = 2'-O-methyl ribonucleotide
  modified_base 14: mod_base = OTHER; note = 2'-fluoro ribonucleotide
  modified_base 15: mod_base = OTHER; note = 2'-O-methyl ribonucleotide
  modified_base 16: mod_base = OTHER; note = 2'-fluoro ribonucleotide
  modified_base 17..23: mod_base = OTHER; note = 2'-O-methyl ribonucleotide
  modified_base 1..3: mod_base = OTHER; note = phosphorothioate linkage
  modified_base 21..23: mod_base = OTHER; note = phosphorothioate linkage
tgtttcacaaacaagctggtcgg

SEQ ID NO: 1051 - RNA, 21 nt, synthetic construct
  source 1..21: mol_type = other RNA
ggcttccgtatatatggcata

SEQ ID NO: 1052 - RNA, 21 nt, synthetic construct
  source 1..21: mol_type = other RNA
tgagaagattgacaggttcaa

SEQ ID NO: 1053 - RNA, 21 nt, synthetic construct
  source 1..21: mol_type = other RNA
gagaagattgacaggttcata

SEQ ID NO: 1054 - RNA, 21 nt, synthetic construct
  source 1..21: mol_type = other RNA
ttccagcaaaactccctcaaa

SEQ ID NO: 1055 - RNA, 21 nt, synthetic construct
  source 1..21: mol_type = other RNA
cctcaactggatgaagaaaca

SEQ ID NO: 1056 - RNA, 21 nt, synthetic construct
  source 1..21: mol_type = other RNA
cgagctgaacctgcaaaaata

SEQ ID NO: 1057 - RNA, 21 nt, synthetic construct
  source 1..21: mol_type = other RNA
acctgcaaaaattgagcaata

SEQ ID NO: 1058 - RNA, 21 nt, synthetic construct
  source 1..21: mol_type = other RNA
ccattcctgtttgctgtgtaa

SEQ ID NO: 1059 - RNA, 21 nt, synthetic construct
  source 1..21: mol_type = other RNA
tgtttgctgtgtatgatcaaa

SEQ ID NO: 1060 - RNA, 21 nt, synthetic construct
  source 1..21: mol_type = other RNA
ggaggcaagaaccagtgttta

SEQ ID NO: 1061 - RNA, 21 nt, synthetic construct
  source 1..21: mol_type = other RNA
caaaaagaattccaaccgaca

SEQ ID NO: 1062 - RNA, 21 nt, synthetic construct
  source 1..21: mol_type = other RNA
cgaccagcttgtttgtgaaaa

SEQ ID NO: 1063 - RNA, 21 nt, synthetic construct
  source 1..21: mol_type = other RNA
gaccagcttgtttgtgaaaca

SEQ ID NO: 1064 - RNA, 21 nt, synthetic construct
  source 1..21: mol_type = other RNA
  modified_base 1..6: mod_base = OTHER; note = 2'-O-methyl ribonucleotide
  modified_base 7: mod_base = OTHER; note = 2'-fluoro ribonucleotide
  modified_base 8: mod_base = OTHER; note = 2'-O-methyl ribonucleotide
  modified_base 9: mod_base = OTHER; note = 2'-fluoro ribonucleotide
  modified_base 10: mod_base = OTHER; note = 2'-O-methyl ribonucleotide
  modified_base 11: mod_base = OTHER; note = 2'-fluoro ribonucleotide
  modified_base 12..21: mod_base = OTHER; note = 2'-O-methyl ribonucleotide
  modified_base 1..3: mod_base = OTHER; note = phosphorothioate linkage
ggcttccgtatatatggcata

SEQ ID NO: 1065 - RNA, 21 nt, synthetic construct
  source 1..21: mol_type = other RNA
  modified_base 1..6: mod_base = OTHER; note = 2'-O-methyl ribonucleotide
  modified_base 7: mod_base = OTHER; note = 2'-fluoro ribonucleotide
  modified_base 8: mod_base = OTHER; note = 2'-O-methyl ribonucleotide
  modified_base 9: mod_base = OTHER; note = 2'-fluoro ribonucleotide
  modified_base 10: mod_base = OTHER; note = 2'-O-methyl ribonucleotide
  modified_base 11: mod_base = OTHER; note = 2'-fluoro ribonucleotide
  modified_base 12..21: mod_base = OTHER; note = 2'-O-methyl ribonucleotide
  modified_base 1..3: mod_base = OTHER; note = phosphorothioate linkage
tgagaagattgacaggttcaa

SEQ ID NO: 1066 - RNA, 21 nt, synthetic construct
  source 1..21: mol_type = other RNA
  modified_base 1..6: mod_base = OTHER; note = 2'-O-methyl ribonucleotide
  modified_base 7: mod_base = OTHER; note = 2'-fluoro ribonucleotide
  modified_base 8: mod_base = OTHER; note = 2'-O-methyl ribonucleotide
  modified_base 9: mod_base = OTHER; note = 2'-fluoro ribonucleotide
  modified_base 10: mod_base = OTHER; note = 2'-O-methyl ribonucleotide
  modified_base 11: mod_base = OTHER; note = 2'-fluoro ribonucleotide
  modified_base 12..21: mod_base = OTHER; note = 2'-O-methyl ribonucleotide
  modified_base 1..3: mod_base = OTHER; note = phosphorothioate linkage
gagaagattgacaggttcata

SEQ ID NO: 1067 - RNA, 21 nt, synthetic construct
  source 1..21: mol_type = other RNA
  modified_base 1..6: mod_base = OTHER; note = 2'-O-methyl ribonucleotide
  modified_base 7: mod_base = OTHER; note = 2'-fluoro ribonucleotide
  modified_base 8: mod_base = OTHER; note = 2'-O-methyl ribonucleotide
  modified_base 9: mod_base = OTHER; note = 2'-fluoro ribonucleotide
  modified_base 10: mod_base = OTHER; note = 2'-O-methyl ribonucleotide
  modified_base 11: mod_base = OTHER; note = 2'-fluoro ribonucleotide
  modified_base 12..21: mod_base = OTHER; note = 2'-O-methyl ribonucleotide
  modified_base 1..3: mod_base = OTHER; note = phosphorothioate linkage
ttccagcaaaactccctcaaa

SEQ ID NO: 1068 - RNA, 21 nt, synthetic construct
  source 1..21: mol_type = other RNA
  modified_base 1..6: mod_base = OTHER; note = 2'-O-methyl ribonucleotide
  modified_base 7: mod_base = OTHER; note = 2'-fluoro ribonucleotide
  modified_base 8: mod_base = OTHER; note = 2'-O-methyl ribonucleotide
  modified_base 9: mod_base = OTHER; note = 2'-fluoro ribonucleotide
  modified_base 10: mod_base = OTHER; note = 2'-O-methyl ribonucleotide
  modified_base 11: mod_base = OTHER; note = 2'-fluoro ribonucleotide
  modified_base 12..21: mod_base = OTHER; note = 2'-O-methyl ribonucleotide
  modified_base 1..3: mod_base = OTHER; note = phosphorothioate linkage
cctcaactggatgaagaaaca

SEQ ID NO: 1069 - RNA, 21 nt, synthetic construct
  source 1..21: mol_type = other RNA
  modified_base 1..6: mod_base = OTHER; note = 2'-O-methyl ribonucleotide
  modified_base 7: mod_base = OTHER; note = 2'-fluoro ribonucleotide
  modified_base 8: mod_base = OTHER; note = 2'-O-methyl ribonucleotide
  modified_base 9: mod_base = OTHER; note = 2'-fluoro ribonucleotide
  modified_base 10: mod_base = OTHER; note = 2'-O-methyl ribonucleotide
  modified_base 11: mod_base = OTHER; note = 2'-fluoro ribonucleotide
  modified_base 12..21: mod_base = OTHER; note = 2'-O-methyl ribonucleotide
  modified_base 1..3: mod_base = OTHER; note = phosphorothioate linkage
cgagctgaacctgcaaaaata

SEQ ID NO: 1070 - RNA, 21 nt, synthetic construct
  source 1..21: mol_type = other RNA
  modified_base 1..6: mod_base = OTHER; note = 2'-O-methyl ribonucleotide
  modified_base 7: mod_base = OTHER; note = 2'-fluoro ribonucleotide
  modified_base 8: mod_base = OTHER; note = 2'-O-methyl ribonucleotide
  modified_base 9: mod_base = OTHER; note = 2'-fluoro ribonucleotide
  modified_base 10: mod_base = OTHER; note = 2'-O-methyl ribonucleotide
  modified_base 11: mod_base = OTHER; note = 2'-fluoro ribonucleotide
  modified_base 12..21: mod_base = OTHER; note = 2'-O-methyl ribonucleotide
  modified_base 1..3: mod_base = OTHER; note = phosphorothioate linkage
acctgcaaaaattgagcaata

SEQ ID NO: 1071 - RNA, 21 nt, synthetic construct
  source 1..21: mol_type = other RNA
  modified_base 1..6: mod_base = OTHER; note = 2'-O-methyl ribonucleotide
  modified_base 7: mod_base = OTHER; note = 2'-fluoro ribonucleotide
  modified_base 8: mod_base = OTHER; note = 2'-O-methyl ribonucleotide
  modified_base 9: mod_base = OTHER; note = 2'-fluoro ribonucleotide
  modified_base 10: mod_base = OTHER; note = 2'-O-methyl ribonucleotide
  modified_base 11: mod_base = OTHER; note = 2'-fluoro ribonucleotide
  modified_base 12..21: mod_base = OTHER; note = 2'-O-methyl ribonucleotide
  modified_base 1..3: mod_base = OTHER; note = phosphorothioate linkage
ccattcctgtttgctgtgtaa

SEQ ID NO: 1072 - RNA, 21 nt, synthetic construct
  source 1..21: mol_type = other RNA
  modified_base 1..6: mod_base = OTHER; note = 2'-O-methyl ribonucleotide
  modified_base 7: mod_base = OTHER; note = 2'-fluoro ribonucleotide
  modified_base 8: mod_base = OTHER; note = 2'-O-methyl ribonucleotide
  modified_base 9: mod_base = OTHER; note = 2'-fluoro ribonucleotide
  modified_base 10: mod_base = OTHER; note = 2'-O-methyl ribonucleotide
  modified_base 11: mod_base = OTHER; note = 2'-fluoro ribonucleotide
  modified_base 12..21: mod_base = OTHER; note = 2'-O-methyl ribonucleotide
  modified_base 1..3: mod_base = OTHER; note = phosphorothioate linkage
tgtttgctgtgtatgatcaaa

SEQ ID NO: 1073 - RNA, 21 nt, synthetic construct
  source 1..21: mol_type = other RNA
  modified_base 1..6: mod_base = OTHER; note = 2'-O-methyl ribonucleotide
  modified_base 7: mod_base = OTHER; note = 2'-fluoro ribonucleotide
  modified_base 8: mod_base = OTHER; note = 2'-O-methyl ribonucleotide
  modified_base 9: mod_base = OTHER; note = 2'-fluoro ribonucleotide
  modified_base 10: mod_base = OTHER; note = 2'-O-methyl ribonucleotide
  modified_base 11: mod_base = OTHER; note = 2'-fluoro ribonucleotide
  modified_base 12..21: mod_base = OTHER; note = 2'-O-methyl ribonucleotide
  modified_base 1..3: mod_base = OTHER; note = phosphorothioate linkage
ggaggcaagaaccagtgttta

SEQ ID NO: 1074 - RNA, 21 nt, synthetic construct
  source 1..21: mol_type = other RNA
  modified_base 1..6: mod_base = OTHER; note = 2'-O-methyl ribonucleotide
  modified_base 7: mod_base = OTHER; note = 2'-fluoro ribonucleotide
  modified_base 8: mod_base = OTHER; note = 2'-O-methyl ribonucleotide
  modified_base 9: mod_base = OTHER; note = 2'-fluoro ribonucleotide
  modified_base 10: mod_base = OTHER; note = 2'-O-methyl ribonucleotide
  modified_base 11: mod_base = OTHER; note = 2'-fluoro ribonucleotide
  modified_base 12..21: mod_base = OTHER; note = 2'-O-methyl ribonucleotide
  modified_base 1..3: mod_base = OTHER; note = phosphorothioate linkage
caaaaagaattccaaccgaca

SEQ ID NO: 1075 - RNA, 21 nt, synthetic construct
  source 1..21: mol_type = other RNA
  modified_base 1..6: mod_base = OTHER; note = 2'-O-methyl ribonucleotide
  modified_base 7: mod_base = OTHER; note = 2'-fluoro ribonucleotide
  modified_base 8: mod_base = OTHER; note = 2'-O-methyl ribonucleotide
  modified_base 9: mod_base = OTHER; note = 2'-fluoro ribonucleotide
  modified_base 10: mod_base = OTHER; note = 2'-O-methyl ribonucleotide
  modified_base 11: mod_base = OTHER; note = 2'-fluoro ribonucleotide
  modified_base 12..21: mod_base = OTHER; note = 2'-O-methyl ribonucleotide
  modified_base 1..3: mod_base = OTHER; note = phosphorothioate linkage
cgaccagcttgtttgtgaaaa

SEQ ID NO: 1076 - RNA, 21 nt, synthetic construct
  source 1..21: mol_type = other RNA
  modified_base 1..6: mod_base = OTHER; note = 2'-O-methyl ribonucleotide
  modified_base 7: mod_base = OTHER; note = 2'-fluoro ribonucleotide
  modified_base 8: mod_base = OTHER; note = 2'-O-methyl ribonucleotide
  modified_base 9: mod_base = OTHER; note = 2'-fluoro ribonucleotide
  modified_base 10: mod_base = OTHER; note = 2'-O-methyl ribonucleotide
  modified_base 11: mod_base = OTHER; note = 2'-fluoro ribonucleotide
  modified_base 12..21: mod_base = OTHER; note = 2'-O-methyl ribonucleotide
  modified_base 1..3: mod_base = OTHER; note = phosphorothioate linkage
gaccagcttgtttgtgaaaca

SEQ ID NO: 1077-2100 - skipped (1024 entries)

SEQ ID NO: 2101 - RNA, 23 nt, synthetic construct
  source 1..23: mol_type = other RNA
ttctcattgtggatgacgaggtg

SEQ ID NO: 2102 - RNA, 23 nt, synthetic construct
  source 1..23: mol_type = other RNA
ttactctcattgtggatgacgag

SEQ ID NO: 2103 - RNA, 23 nt, synthetic construct
  source 1..23: mol_type = other RNA
tatatacggaagcccaagaagtt

SEQ ID NO: 2104 - RNA, 23 nt, synthetic construct
  source 1..23: mol_type = other RNA
tagggagttttgctggaaagtga

SEQ ID NO: 2105 - RNA, 23 nt, synthetic construct
  source 1..23: mol_type = other RNA
ttagaagaaaaggtgggagactg

SEQ ID NO: 2106 - RNA, 23 nt, synthetic construct
  source 1..23: mol_type = other RNA
tttagaagaaaaggtgggagact

SEQ ID NO: 2107 - RNA, 23 nt, synthetic construct
  source 1..23: mol_type = other RNA
ttcattagaagaaaaggtgggag

SEQ ID NO: 2108 - RNA, 23 nt, synthetic construct
  source 1..23: mol_type = other RNA
tactcattagaagaaaaggtggg

SEQ ID NO: 2109-2110 - skipped (2 entries)

SEQ ID NO: 2111 - RNA, 23 nt, synthetic construct
  source 1..23: mol_type = other RNA
  modified_base 1: mod_base = OTHER; note = 2'-O-methyl ribonucleotide
  modified_base 2: mod_base = OTHER; note = 2'-fluoro ribonucleotide
  modified_base 3..6: mod_base = OTHER; note = 2'-O-methyl ribonucleotide
  modified_base 7: mod_base = OTHER; note = 2'-fluoro ribonucleotide
  modified_base 8..11: mod_base = OTHER; note = 2'-O-methyl ribonucleotide
  modified_base 12: mod_base = OTHER; note = 2'-fluoro ribonucleotide
  modified_base 13: mod_base = OTHER; note = 2'-O-methyl ribonucleotide
  modified_base 14: mod_base = OTHER; note = 2'-fluoro ribonucleotide
  modified_base 15: mod_base = OTHER; note = 2'-O-methyl ribonucleotide
  modified_base 16: mod_base = OTHER; note = 2'-fluoro ribonucleotide
  modified_base 17..23: mod_base = OTHER; note = 2'-O-methyl ribonucleotide
  modified_base 1..3: mod_base = OTHER; note = phosphorothioate linkage
  modified_base 21..23: mod_base = OTHER; note = phosphorothioate linkage
ttctcattgtggatgacgaggtg

SEQ ID NO: 2112 - RNA, 23 nt, synthetic construct
  source 1..23: mol_type = other RNA
  modified_base 1: mod_base = OTHER; note = 2'-O-methyl ribonucleotide
  modified_base 2: mod_base = OTHER; note = 2'-fluoro ribonucleotide
  modified_base 3..6: mod_base = OTHER; note = 2'-O-methyl ribonucleotide
  modified_base 7: mod_base = OTHER; note = 2'-fluoro ribonucleotide
  modified_base 8..11: mod_base = OTHER; note = 2'-O-methyl ribonucleotide
  modified_base 12: mod_base = OTHER; note = 2'-fluoro ribonucleotide
  modified_base 13: mod_base = OTHER; note = 2'-O-methyl ribonucleotide
  modified_base 14: mod_base = OTHER; note = 2'-fluoro ribonucleotide
  modified_base 15: mod_base = OTHER; note = 2'-O-methyl ribonucleotide
  modified_base 16: mod_base = OTHER; note = 2'-fluoro ribonucleotide
  modified_base 17..23: mod_base = OTHER; note = 2'-O-methyl ribonucleotide
  modified_base 1..3: mod_base = OTHER; note = phosphorothioate linkage
  modified_base 21..23: mod_base = OTHER; note = phosphorothioate linkage
ttactctcattgtggatgacgag

SEQ ID NO: 2113 - RNA, 23 nt, synthetic construct
  source 1..23: mol_type = other RNA
  modified_base 1: mod_base = OTHER; note = 2'-O-methyl ribonucleotide
  modified_base 2: mod_base = OTHER; note = 2'-fluoro ribonucleotide
  modified_base 3..6: mod_base = OTHER; note = 2'-O-methyl ribonucleotide
  modified_base 7: mod_base = OTHER; note = 2'-fluoro ribonucleotide
  modified_base 8..11: mod_base = OTHER; note = 2'-O-methyl ribonucleotide
  modified_base 12: mod_base = OTHER; note = 2'-fluoro ribonucleotide
  modified_base 13: mod_base = OTHER; note = 2'-O-methyl ribonucleotide
  modified_base 14: mod_base = OTHER; note = 2'-fluoro ribonucleotide
  modified_base 15: mod_base = OTHER; note = 2'-O-methyl ribonucleotide
  modified_base 16: mod_base = OTHER; note = 2'-fluoro ribonucleotide
  modified_base 17..23: mod_base = OTHER; note = 2'-O-methyl ribonucleotide
  modified_base 1..3: mod_base = OTHER; note = phosphorothioate linkage
  modified_base 21..23: mod_base = OTHER; note = phosphorothioate linkage
tatatacggaagcccaagaagtt

SEQ ID NO: 2114 - RNA, 23 nt, synthetic construct
  source 1..23: mol_type = other RNA
  modified_base 1: mod_base = OTHER; note = 2'-O-methyl ribonucleotide
  modified_base 2: mod_base = OTHER; note = 2'-fluoro ribonucleotide
  modified_base 3..6: mod_base = OTHER; note = 2'-O-methyl ribonucleotide
  modified_base 7: mod_base = OTHER; note = 2'-fluoro ribonucleotide
  modified_base 8..11: mod_base = OTHER; note = 2'-O-methyl ribonucleotide
  modified_base 12: mod_base = OTHER; note = 2'-fluoro ribonucleotide
  modified_base 13: mod_base = OTHER; note = 2'-O-methyl ribonucleotide
  modified_base 14: mod_base = OTHER; note = 2'-fluoro ribonucleotide
  modified_base 15: mod_base = OTHER; note = 2'-O-methyl ribonucleotide
  modified_base 16: mod_base = OTHER; note = 2'-fluoro ribonucleotide
  modified_base 17..23: mod_base = OTHER; note = 2'-O-methyl ribonucleotide
  modified_base 1..3: mod_base = OTHER; note = phosphorothioate linkage
  modified_base 21..23: mod_base = OTHER; note = phosphorothioate linkage
tagggagttttgctggaaagtga

SEQ ID NO: 2115 - RNA, 23 nt, synthetic construct
  source 1..23: mol_type = other RNA
  modified_base 1: mod_base = OTHER; note = 2'-O-methyl ribonucleotide
  modified_base 2: mod_base = OTHER; note = 2'-fluoro ribonucleotide
  modified_base 3..6: mod_base = OTHER; note = 2'-O-methyl ribonucleotide
  modified_base 7: mod_base = OTHER; note = 2'-fluoro ribonucleotide
  modified_base 8..11: mod_base = OTHER; note = 2'-O-methyl ribonucleotide
  modified_base 12: mod_base = OTHER; note = 2'-fluoro ribonucleotide
  modified_base 13: mod_base = OTHER; note = 2'-O-methyl ribonucleotide
  modified_base 14: mod_base = OTHER; note = 2'-fluoro ribonucleotide
  modified_base 15: mod_base = OTHER; note = 2'-O-methyl ribonucleotide
  modified_base 16: mod_base = OTHER; note = 2'-fluoro ribonucleotide
  modified_base 17..23: mod_base = OTHER; note = 2'-O-methyl ribonucleotide
  modified_base 1..3: mod_base = OTHER; note = phosphorothioate linkage
  modified_base 21..23: mod_base = OTHER; note = phosphorothioate linkage
ttagaagaaaaggtgggagactg

SEQ ID NO: 2116 - RNA, 23 nt, synthetic construct
  source 1..23: mol_type = other RNA
  modified_base 1: mod_base = OTHER; note = 2'-O-methyl ribonucleotide
  modified_base 2: mod_base = OTHER; note = 2'-fluoro ribonucleotide
  modified_base 3..6: mod_base = OTHER; note = 2'-O-methyl ribonucleotide
  modified_base 7: mod_base = OTHER; note = 2'-fluoro ribonucleotide
  modified_base 8..11: mod_base = OTHER; note = 2'-O-methyl ribonucleotide
  modified_base 12: mod_base = OTHER; note = 2'-fluoro ribonucleotide
  modified_base 13: mod_base = OTHER; note = 2'-O-methyl ribonucleotide
  modified_base 14: mod_base = OTHER; note = 2'-fluoro ribonucleotide
  modified_base 15: mod_base = OTHER; note = 2'-O-methyl ribonucleotide
  modified_base 16: mod_base = OTHER; note = 2'-fluoro ribonucleotide
  modified_base 17..23: mod_base = OTHER; note = 2'-O-methyl ribonucleotide
  modified_base 1..3: mod_base = OTHER; note = phosphorothioate linkage
  modified_base 21..23: mod_base = OTHER; note = phosphorothioate linkage
tttagaagaaaaggtgggagact

SEQ ID NO: 2117 - RNA, 23 nt, synthetic construct
  source 1..23: mol_type = other RNA
  modified_base 1: mod_base = OTHER; note = 2'-O-methyl ribonucleotide
  modified_base 2: mod_base = OTHER; note = 2'-fluoro ribonucleotide
  modified_base 3..6: mod_base = OTHER; note = 2'-O-methyl ribonucleotide
  modified_base 7: mod_base = OTHER; note = 2'-fluoro ribonucleotide
  modified_base 8..11: mod_base = OTHER; note = 2'-O-methyl ribonucleotide
  modified_base 12: mod_base = OTHER; note = 2'-fluoro ribonucleotide
  modified_base 13: mod_base = OTHER; note = 2'-O-methyl ribonucleotide
  modified_base 14: mod_base = OTHER; note = 2'-fluoro ribonucleotide
  modified_base 15: mod_base = OTHER; note = 2'-O-methyl ribonucleotide
  modified_base 16: mod_base = OTHER; note = 2'-fluoro ribonucleotide
  modified_base 17..23: mod_base = OTHER; note = 2'-O-methyl ribonucleotide
  modified_base 1..3: mod_base = OTHER; note = phosphorothioate linkage
  modified_base 21..23: mod_base = OTHER; note = phosphorothioate linkage
ttcattagaagaaaaggtgggag

SEQ ID NO: 2118 - RNA, 23 nt, synthetic construct
  source 1..23: mol_type = other RNA
  modified_base 1: mod_base = OTHER; note = 2'-O-methyl ribonucleotide
  modified_base 2: mod_base = OTHER; note = 2'-fluoro ribonucleotide
  modified_base 3..6: mod_base = OTHER; note = 2'-O-methyl ribonucleotide
  modified_base 7: mod_base = OTHER; note = 2'-fluoro ribonucleotide
  modified_base 8..11: mod_base = OTHER; note = 2'-O-methyl ribonucleotide
  modified_base 12: mod_base = OTHER; note = 2'-fluoro ribonucleotide
  modified_base 13: mod_base = OTHER; note = 2'-O-methyl ribonucleotide
  modified_base 14: mod_base = OTHER; note = 2'-fluoro ribonucleotide
  modified_base 15: mod_base = OTHER; note = 2'-O-methyl ribonucleotide
  modified_base 16: mod_base = OTHER; note = 2'-fluoro ribonucleotide
  modified_base 17..23: mod_base = OTHER; note = 2'-O-methyl ribonucleotide
  modified_base 1..3: mod_base = OTHER; note = phosphorothioate linkage
  modified_base 21..23: mod_base = OTHER; note = phosphorothioate linkage
tactcattagaagaaaaggtggg

SEQ ID NO: 2119-2120 - skipped (2 entries)

SEQ ID NO: 2121 - RNA, 21 nt, synthetic construct
  source 1..21: mol_type = other RNA
cctcgtcatccacaatgagaa

SEQ ID NO: 2122 - RNA, 21 nt, synthetic construct
  source 1..21: mol_type = other RNA
cgtcatccacaatgagagtaa

SEQ ID NO: 2123 - RNA, 21 nt, synthetic construct
  source 1..21: mol_type = other RNA
cttcttgggcttccgtatata

SEQ ID NO: 2124 - RNA, 21 nt, synthetic construct
  source 1..21: mol_type = other RNA
actttccagcaaaactcccta

SEQ ID NO: 2125 - RNA, 21 nt, synthetic construct
  source 1..21: mol_type = other RNA
gtctcccaccttttcttctaa

SEQ ID NO: 2126 - RNA, 21 nt, synthetic construct
  source 1..21: mol_type = other RNA
tctcccaccttttcttctaaa

SEQ ID NO: 2127 - RNA, 21 nt, synthetic construct
  source 1..21: mol_type = other RNA
cccaccttttcttctaatgaa

SEQ ID NO: 2128 - RNA, 21 nt, synthetic construct
  source 1..21: mol_type = other RNA
caccttttcttctaatgagta

SEQ ID NO: 2129-2130 - skipped (2 entries)

SEQ ID NO: 2131 - RNA, 21 nt, synthetic construct
  source 1..21: mol_type = other RNA
  modified_base 1..6: mod_base = OTHER; note = 2'-O-methyl ribonucleotide
  modified_base 7: mod_base = OTHER; note = 2'-fluoro ribonucleotide
  modified_base 8: mod_base = OTHER; note = 2'-O-methyl ribonucleotide
  modified_base 9: mod_base = OTHER; note = 2'-fluoro ribonucleotide
  modified_base 10: mod_base = OTHER; note = 2'-O-methyl ribonucleotide
  modified_base 11: mod_base = OTHER; note = 2'-fluoro ribonucleotide
  modified_base 12..21: mod_base = OTHER; note = 2'-O-methyl ribonucleotide
  modified_base 1..3: mod_base = OTHER; note = phosphorothioate linkage
cctcgtcatccacaatgagaa

SEQ ID NO: 2132 - RNA, 21 nt, synthetic construct
  source 1..21: mol_type = other RNA
  modified_base 1..6: mod_base = OTHER; note = 2'-O-methyl ribonucleotide
  modified_base 7: mod_base = OTHER; note = 2'-fluoro ribonucleotide
  modified_base 8: mod_base = OTHER; note = 2'-O-methyl ribonucleotide
  modified_base 9: mod_base = OTHER; note = 2'-fluoro ribonucleotide
  modified_base 10: mod_base = OTHER; note = 2'-O-methyl ribonucleotide
  modified_base 11: mod_base = OTHER; note = 2'-fluoro ribonucleotide
  modified_base 12..21: mod_base = OTHER; note = 2'-O-methyl ribonucleotide
  modified_base 1..3: mod_base = OTHER; note = phosphorothioate linkage
cgtcatccacaatgagagtaa

SEQ ID NO: 2133 - RNA, 21 nt, synthetic construct
  source 1..21: mol_type = other RNA
  modified_base 1..6: mod_base = OTHER; note = 2'-O-methyl ribonucleotide
  modified_base 7: mod_base = OTHER; note = 2'-fluoro ribonucleotide
  modified_base 8: mod_base = OTHER; note = 2'-O-methyl ribonucleotide
  modified_base 9: mod_base = OTHER; note = 2'-fluoro ribonucleotide
  modified_base 10: mod_base = OTHER; note = 2'-O-methyl ribonucleotide
  modified_base 11: mod_base = OTHER; note = 2'-fluoro ribonucleotide
  modified_base 12..21: mod_base = OTHER; note = 2'-O-methyl ribonucleotide
  modified_base 1..3: mod_base = OTHER; note = phosphorothioate linkage
cttcttgggcttccgtatata

SEQ ID NO: 2134 - RNA, 21 nt, synthetic construct
  source 1..21: mol_type = other RNA
  modified_base 1..6: mod_base = OTHER; note = 2'-O-methyl ribonucleotide
  modified_base 7: mod_base = OTHER; note = 2'-fluoro ribonucleotide
  modified_base 8: mod_base = OTHER; note = 2'-O-methyl ribonucleotide
  modified_base 9: mod_base = OTHER; note = 2'-fluoro ribonucleotide
  modified_base 10: mod_base = OTHER; note = 2'-O-methyl ribonucleotide
  modified_base 11: mod_base = OTHER; note = 2'-fluoro ribonucleotide
  modified_base 12..21: mod_base = OTHER; note = 2'-O-methyl ribonucleotide
  modified_base 1..3: mod_base = OTHER; note = phosphorothioate linkage
actttccagcaaaactcccta

SEQ ID NO: 2135 - RNA, 21 nt, synthetic construct
  source 1..21: mol_type = other RNA
  modified_base 1..6: mod_base = OTHER; note = 2'-O-methyl ribonucleotide
  modified_base 7: mod_base = OTHER; note = 2'-fluoro ribonucleotide
  modified_base 8: mod_base = OTHER; note = 2'-O-methyl ribonucleotide
  modified_base 9: mod_base = OTHER; note = 2'-fluoro ribonucleotide
  modified_base 10: mod_base = OTHER; note = 2'-O-methyl ribonucleotide
  modified_base 11: mod_base = OTHER; note = 2'-fluoro ribonucleotide
  modified_base 12..21: mod_base = OTHER; note = 2'-O-methyl ribonucleotide
  modified_base 1..3: mod_base = OTHER; note = phosphorothioate linkage
gtctcccaccttttcttctaa

SEQ ID NO: 2136 - RNA, 21 nt, synthetic construct
  source 1..21: mol_type = other RNA
  modified_base 1..6: mod_base = OTHER; note = 2'-O-methyl ribonucleotide
  modified_base 7: mod_base = OTHER; note = 2'-fluoro ribonucleotide
  modified_base 8: mod_base = OTHER; note = 2'-O-methyl ribonucleotide
  modified_base 9: mod_base = OTHER; note = 2'-fluoro ribonucleotide
  modified_base 10: mod_base = OTHER; note = 2'-O-methyl ribonucleotide
  modified_base 11: mod_base = OTHER; note = 2'-fluoro ribonucleotide
  modified_base 12..21: mod_base = OTHER; note = 2'-O-methyl ribonucleotide
  modified_base 1..3: mod_base = OTHER; note = phosphorothioate linkage
tctcccaccttttcttctaaa

SEQ ID NO: 2137 - RNA, 21 nt, synthetic construct
  source 1..21: mol_type = other RNA
  modified_base 1..6: mod_base = OTHER; note = 2'-O-methyl ribonucleotide
  modified_base 7: mod_base = OTHER; note = 2'-fluoro ribonucleotide
  modified_base 8: mod_base = OTHER; note = 2'-O-methyl ribonucleotide
  modified_base 9: mod_base = OTHER; note = 2'-fluoro ribonucleotide
  modified_base 10: mod_base = OTHER; note = 2'-O-methyl ribonucleotide
  modified_base 11: mod_base = OTHER; note = 2'-fluoro ribonucleotide
  modified_base 12..21: mod_base = OTHER; note = 2'-O-methyl ribonucleotide
  modified_base 1..3: mod_base = OTHER; note = phosphorothioate linkage
cccaccttttcttctaatgaa

SEQ ID NO: 2138 - RNA, 21 nt, synthetic construct
  source 1..21: mol_type = other RNA
  modified_base 1..6: mod_base = OTHER; note = 2'-O-methyl ribonucleotide
  modified_base 7: mod_base = OTHER; note = 2'-fluoro ribonucleotide
  modified_base 8: mod_base = OTHER; note = 2'-O-methyl ribonucleotide
  modified_base 9: mod_base = OTHER; note = 2'-fluoro ribonucleotide
  modified_base 10: mod_base = OTHER; note = 2'-O-methyl ribonucleotide
  modified_base 11: mod_base = OTHER; note = 2'-fluoro ribonucleotide
  modified_base 12..21: mod_base = OTHER; note = 2'-O-methyl ribonucleotide
  modified_base 1..3: mod_base = OTHER; note = phosphorothioate linkage
caccttttcttctaatgagta

SEQ ID NO: 2139-2150 - skipped (12 entries)

SEQ ID NO: 2151 - RNA, 22 nt, synthetic construct
  source 1..22: mol_type = other RNA
tattgtcaatttttgcaggttc

SEQ ID NO: 2152 - RNA, 22 nt, synthetic construct
  source 1..22: mol_type = other RNA
tattgccaatttttgcaggttc

SEQ ID NO: 2153 - RNA, 22 nt, synthetic construct
  source 1..22: mol_type = other RNA
tattgctaatttttgcaggttc

SEQ ID NO: 2154 - RNA, 22 nt, synthetic construct
  source 1..22: mol_type = other RNA
tattgtcaatttttgcaggttc

SEQ ID NO: 2155 - RNA, 22 nt, synthetic construct
  source 1..22: mol_type = other RNA
tattgccaatttttgcaggttc

SEQ ID NO: 2156 - RNA, 22 nt, synthetic construct
  source 1..22: mol_type = other RNA
tattgctaatttttgcaggttc

SEQ ID NO: 2157 - RNA, 23 nt, synthetic construct
  source 1..23: mol_type = other RNA
  modified_base 7: mod_base = OTHER; note = 5-methyluridine-3'-phosphate
tattgctcaatttttgcaggttc

SEQ ID NO: 2158 - RNA, 23 nt, synthetic construct
  source 1..23: mol_type = other RNA
  modified_base 7: mod_base = OTHER; note = 5-methyluridine-3'-phosphate
tattgctcaatttttgcaggttc

SEQ ID NO: 2159 - RNA, 22 nt, synthetic construct
  source 1..22: mol_type = other RNA
tattgccaatttttgcaggttc

SEQ ID NO: 2160 - skipped

SEQ ID NO: 2161 - DNA, 23 bp, synthetic construct
  source 1..23: mol_type = other DNA
  modified_base 1: mod_base = OTHER; note = 2'-O-methyl ribonucleotide
  modified_base 2: mod_base = OTHER; note = 2'-fluoro ribonucleotide
  modified_base 3..5: mod_base = OTHER; note = 2'-O-methyl ribonucleotide
  modified_base 6: mod_base = OTHER; note = 1',2'-Dideoxyribose-3'phosphate
  modified_base 7: mod_base = OTHER; note = 2'-fluoro ribonucleotide
  modified_base 8..11: mod_base = OTHER; note = 2'-O-methyl ribonucleotide
  modified_base 12: mod_base = OTHER; note = 2'-fluoro ribonucleotide
  modified_base 13: mod_base = OTHER; note = 2'-O-methyl ribonucleotide
  modified_base 14: mod_base = OTHER; note = 2'-fluoro ribonucleotide
  modified_base 15: mod_base = OTHER; note = 2'-O-methyl ribonucleotide
  modified_base 16: mod_base = OTHER; note = 2'-fluoro ribonucleotide
  modified_base 17..23: mod_base = OTHER; note = 2'-O-methyl ribonucleotide
  modified_base 1..3: mod_base = OTHER; note = phosphorothioate linkage
  modified_base 21..23: mod_base = OTHER; note = phosphorothioate linkage
  misc_feature 1..5: note = RNA
  misc_feature 6: note = DNA
  misc_feature 7..23: note = RNA
tattgntcaatttttgcaggttc

SEQ ID NO: 2162 - DNA, 23 bp, synthetic construct
  source 1..23: mol_type = other DNA
  modified_base 1: mod_base = OTHER; note = 2'-O-methyl ribonucleotide
  modified_base 2: mod_base = OTHER; note = 2'-fluoro ribonucleotide
  modified_base 3..6: mod_base = OTHER; note = 2'-O-methyl ribonucleotide
  modified_base 7: mod_base = OTHER; note = 1',2'-Dideoxyribose-3'phosphate
  modified_base 8..11: mod_base = OTHER; note = 2'-O-methyl ribonucleotide
  modified_base 12: mod_base = OTHER; note = 2'-fluoro ribonucleotide
  modified_base 13: mod_base = OTHER; note = 2'-O-methyl ribonucleotide
  modified_base 14: mod_base = OTHER; note = 2'-fluoro ribonucleotide
  modified_base 15: mod_base = OTHER; note = 2'-O-methyl ribonucleotide
  modified_base 16: mod_base = OTHER; note = 2'-fluoro ribonucleotide
  modified_base 17..23: mod_base = OTHER; note = 2'-O-methyl ribonucleotide
  modified_base 1..3: mod_base = OTHER; note = phosphorothioate linkage
  modified_base 21..23: mod_base = OTHER; note = phosphorothioate linkage
  misc_feature 1..6: note = RNA
  misc_feature 7: note = DNA
  misc_feature 8..23: note = RNA
tattgcncaatttttgcaggttc

SEQ ID NO: 2163 - DNA, 23 bp, synthetic construct
  source 1..23: mol_type = other DNA
  modified_base 1: mod_base = OTHER; note = 2'-O-methyl ribonucleotide
  modified_base 2: mod_base = OTHER; note = 2'-fluoro ribonucleotide
  modified_base 3..6: mod_base = OTHER; note = 2'-O-methyl ribonucleotide
  modified_base 7: mod_base = OTHER; note = 2'-fluoro ribonucleotide
  modified_base 8: mod_base = OTHER; note = 1',2'-Dideoxyribose-3'phosphate
  modified_base 9..11: mod_base = OTHER; note = 2'-O-methyl ribonucleotide
  modified_base 12: mod_base = OTHER; note = 2'-fluoro ribonucleotide
  modified_base 13: mod_base = OTHER; note = 2'-O-methyl ribonucleotide
  modified_base 14: mod_base = OTHER; note = 2'-fluoro ribonucleotide
  modified_base 15: mod_base = OTHER; note = 2'-O-methyl ribonucleotide
  modified_base 16: mod_base = OTHER; note = 2'-fluoro ribonucleotide
  modified_base 17..23: mod_base = OTHER; note = 2'-O-methyl ribonucleotide
  modified_base 1..3: mod_base = OTHER; note = phosphorothioate linkage
  modified_base 21..23: mod_base = OTHER; note = phosphorothioate linkage
  misc_feature 1..7: note = RNA
  misc_feature 8: note = DNA
  misc_feature 9..23: note = RNA
tattgctnaatttttgcaggttc

SEQ ID NO: 2164 - RNA, 23 nt, synthetic construct
  source 1..23: mol_type = other RNA
  modified_base 1: mod_base = OTHER; note = 2'-O-methyl ribonucleotide
  modified_base 2: mod_base = OTHER; note = 2'-fluoro ribonucleotide
  modified_base 3..5: mod_base = OTHER; note = 2'-O-methyl ribonucleotide
  modified_base 6: mod_base = OTHER; note = acyclic N-acetyl L-threoninol abasic nucleic acid-3'-phosphate
  modified_base 7: mod_base = OTHER; note = 2'-fluoro ribonucleotide
  modified_base 8..11: mod_base = OTHER; note = 2'-O-methyl ribonucleotide
  modified_base 12: mod_base = OTHER; note = 2'-fluoro ribonucleotide
  modified_base 13: mod_base = OTHER; note = 2'-O-methyl ribonucleotide
  modified_base 14: mod_base = OTHER; note = 2'-fluoro ribonucleotide
  modified_base 15: mod_base = OTHER; note = 2'-O-methyl ribonucleotide
  modified_base 16: mod_base = OTHER; note = 2'-fluoro ribonucleotide
  modified_base 17..23: mod_base = OTHER; note = 2'-O-methyl ribonucleotide
  modified_base 1..3: mod_base = OTHER; note = phosphorothioate linkage
  modified_base 21..23: mod_base = OTHER; note = phosphorothioate linkage
tattgntcaatttttgcaggttc

SEQ ID NO: 2165 - RNA, 23 nt, synthetic construct
  source 1..23: mol_type = other RNA
  modified_base 1: mod_base = OTHER; note = 2'-O-methyl ribonucleotide
  modified_base 2: mod_base = OTHER; note = 2'-fluoro ribonucleotide
  modified_base 3..6: mod_base = OTHER; note = 2'-O-methyl ribonucleotide
  modified_base 7: mod_base = OTHER; note = acyclic N-acetyl L-threoninol abasic nucleic acid-3'-phosphate
  modified_base 8..11: mod_base = OTHER; note = 2'-O-methyl ribonucleotide
  modified_base 12: mod_base = OTHER; note = 2'-fluoro ribonucleotide
  modified_base 13: mod_base = OTHER; note = 2'-O-methyl ribonucleotide
  modified_base 14: mod_base = OTHER; note = 2'-fluoro ribonucleotide
  modified_base 15: mod_base = OTHER; note = 2'-O-methyl ribonucleotide
  modified_base 16: mod_base = OTHER; note = 2'-fluoro ribonucleotide
  modified_base 17..23: mod_base = OTHER; note = 2'-O-methyl ribonucleotide
  modified_base 1..3: mod_base = OTHER; note = phosphorothioate linkage
  modified_base 21..23: mod_base = OTHER; note = phosphorothioate linkage
tattgcncaatttttgcaggttc

SEQ ID NO: 2166 - RNA, 23 nt, synthetic construct
  source 1..23: mol_type = other RNA
  modified_base 1: mod_base = OTHER; note = 2'-O-methyl ribonucleotide
  modified_base 2: mod_base = OTHER; note = 2'-fluoro ribonucleotide
  modified_base 3..6: mod_base = OTHER; note = 2'-O-methyl ribonucleotide
  modified_base 7: mod_base = OTHER; note = 2'-fluoro ribonucleotide
  modified_base 8: mod_base = OTHER; note = acyclic N-acetyl L-threoninol abasic nucleic acid-3'-phosphate
  modified_base 9..11: mod_base = OTHER; note = 2'-O-methyl ribonucleotide
  modified_base 12: mod_base = OTHER; note = 2'-fluoro ribonucleotide
  modified_base 13: mod_base = OTHER; note = 2'-O-methyl ribonucleotide
  modified_base 14: mod_base = OTHER; note = 2'-fluoro ribonucleotide
  modified_base 15: mod_base = OTHER; note = 2'-O-methyl ribonucleotide
  modified_base 16: mod_base = OTHER; note = 2'-fluoro ribonucleotide
  modified_base 17..23: mod_base = OTHER; note = 2'-O-methyl ribonucleotide
  modified_base 1..3: mod_base = OTHER; note = phosphorothioate linkage
  modified_base 21..23: mod_base = OTHER; note = phosphorothioate linkage
tattgctnaatttttgcaggttc

SEQ ID NO: 2167 - RNA, 23 nt, synthetic construct
  source 1..23: mol_type = other RNA
  modified_base 1: mod_base = OTHER; note = 2'-O-methyl ribonucleotide
  modified_base 2: mod_base = OTHER; note = 2'-fluoro ribonucleotide
  modified_base 3..6: mod_base = OTHER; note = 2'-O-methyl ribonucleotide
  modified_base 7: mod_base = OTHER; note = acyclic L-threoninol nucleic acid-thymine-3'-phosphate
  modified_base 8..11: mod_base = OTHER; note = 2'-O-methyl ribonucleotide
  modified_base 12: mod_base = OTHER; note = 2'-fluoro ribonucleotide
  modified_base 13: mod_base = OTHER; note = 2'-O-methyl ribonucleotide
  modified_base 14: mod_base = OTHER; note = 2'-fluoro ribonucleotide
  modified_base 15: mod_base = OTHER; note = 2'-O-methyl ribonucleotide
  modified_base 16: mod_base = OTHER; note = 2'-fluoro ribonucleotide
  modified_base 17..23: mod_base = OTHER; note = 2'-O-methyl ribonucleotide
  modified_base 1..3: mod_base = OTHER; note = phosphorothioate linkage
  modified_base 21..23: mod_base = OTHER; note = phosphorothioate linkage
tattgctcaatttttgcaggttc

SEQ ID NO: 2168 - RNA, 23 nt, synthetic construct
  source 1..23: mol_type = other RNA
  modified_base 1: mod_base = OTHER; note = 2'-O-methyl ribonucleotide
  modified_base 2: mod_base = OTHER; note = 2'-fluoro ribonucleotide
  modified_base 3..6: mod_base = OTHER; note = 2'-O-methyl ribonucleotide
  modified_base 7: mod_base = OTHER; note = thymidine-glycol nucleic acid (GNA) S-isomer
  modified_base 8..11: mod_base = OTHER; note = 2'-O-methyl ribonucleotide
  modified_base 12: mod_base = OTHER; note = 2'-fluoro ribonucleotide
  modified_base 13: mod_base = OTHER; note = 2'-O-methyl ribonucleotide
  modified_base 14: mod_base = OTHER; note = 2'-fluoro ribonucleotide
  modified_base 15: mod_base = OTHER; note = 2'-O-methyl ribonucleotide
  modified_base 16: mod_base = OTHER; note = 2'-fluoro ribonucleotide
  modified_base 17..23: mod_base = OTHER; note = 2'-O-methyl ribonucleotide
  modified_base 1..3: mod_base = OTHER; note = phosphorothioate linkage
  modified_base 21..23: mod_base = OTHER; note = phosphorothioate linkage
tattgctcaatttttgcaggttc

SEQ ID NO: 2169 - RNA, 23 nt, synthetic construct
  source 1..23: mol_type = other RNA
  modified_base 1: mod_base = OTHER; note = 2'-O-methyl ribonucleotide
  modified_base 2: mod_base = OTHER; note = 2'-fluoro ribonucleotide
  modified_base 3..6: mod_base = OTHER; note = 2'-O-methyl ribonucleotide
  modified_base 7: mod_base = OTHER; note = acyclic N-acetyl L-threoninol abasic nucleic acid-3'-phosphate
  modified_base 8..11: mod_base = OTHER; note = 2'-O-methyl ribonucleotide
  modified_base 12: mod_base = OTHER; note = 2'-fluoro ribonucleotide
  modified_base 13: mod_base = OTHER; note = 2'-O-methyl ribonucleotide
  modified_base 14: mod_base = OTHER; note = 2'-fluoro ribonucleotide
  modified_base 15: mod_base = OTHER; note = 2'-O-methyl ribonucleotide
  modified_base 16: mod_base = OTHER; note = 2'-fluoro ribonucleotide
  modified_base 17..23: mod_base = OTHER; note = 2'-O-methyl ribonucleotide
  modified_base 1..3: mod_base = OTHER; note = phosphorothioate linkage
  modified_base 21..23: mod_base = OTHER; note = phosphorothioate linkage
tattgcncaatttttgcaggttc

SEQ ID NO: 2170-2180 - skipped (11 entries)

SEQ ID NO: 2181 - RNA, 21 nt, synthetic construct
  source 1..21: mol_type = other RNA
  modified_base 1..6: mod_base = OTHER; note = 2'-O-methyl ribonucleotide
  modified_base 7: mod_base = OTHER; note = 2'-fluoro ribonucleotide
  modified_base 8: mod_base = OTHER; note = 2'-O-methyl ribonucleotide
  modified_base 9: mod_base = OTHER; note = 2'-fluoro ribonucleotide
  modified_base 10: mod_base = OTHER; note = 2'-O-methyl ribonucleotide
  modified_base 11: mod_base = OTHER; note = 2'-fluoro ribonucleotide
  modified_base 12..14: mod_base = OTHER; note = 2'-O-methyl ribonucleotide
  modified_base 15: mod_base = OTHER; note = 2-amino-2'-O-methyladenosine-3'-phosphate
  modified_base 16..21: mod_base = OTHER; note = 2'-O-methyl ribonucleotide
  modified_base 1..3: mod_base = OTHER; note = phosphorothioate linkage
acctgcaaaaattgagcaata

SEQ ID NO: 2182-2190 - skipped (9 entries)

SEQ ID NO: 2191 - RNA, 22 nt, synthetic construct
  source 1..22: mol_type = other RNA
tttgatctacacagcaaacagg

SEQ ID NO: 2192 - RNA, 22 nt, synthetic construct
  source 1..22: mol_type = other RNA
tttgatctacacagcaaacagg

SEQ ID NO: 2193 - skipped

SEQ ID NO: 2194 - RNA, 22 nt, synthetic construct
  source 1..22: mol_type = other RNA
tagaccaggagaaacggctgct

SEQ ID NO: 2195 - RNA, 22 nt, synthetic construct
  source 1..22: mol_type = other RNA
tagaccaggagaaacggctgct

SEQ ID NO: 2196 - RNA, 22 nt, synthetic construct
  source 1..22: mol_type = other RNA
tagaccaggagaaacggctgct

SEQ ID NO: 2197 - RNA, 22 nt, synthetic construct
  source 1..22: mol_type = other RNA
tagaccaggagaaacggctgct

SEQ ID NO: 2198 - skipped

SEQ ID NO: 2199 - RNA, 22 nt, synthetic construct
  source 1..22: mol_type = other RNA
tgtcggtggaattctttttgga

SEQ ID NO: 2200 - skipped

SEQ ID NO: 2201 - RNA, 23 nt, synthetic construct
  source 1..23: mol_type = other RNA
  modified_base 1: mod_base = OTHER; note = 2'-O-methyl ribonucleotide
  modified_base 2: mod_base = OTHER; note = 2'-fluoro ribonucleotide
  modified_base 3..6: mod_base = OTHER; note = 2'-O-methyl ribonucleotide
  modified_base 7: mod_base = OTHER; note = 2'-fluoro ribonucleotide
  modified_base 8..11: mod_base = OTHER; note = 2'-O-methyl ribonucleotide
  modified_base 12: mod_base = OTHER; note = 2'-fluoro ribonucleotide
  modified_base 13: mod_base = OTHER; note = 2'-O-methyl ribonucleotide
  modified_base 14: mod_base = OTHER; note = 2'-fluoro ribonucleotide
  modified_base 15: mod_base = OTHER; note = 2'-O-methyl ribonucleotide
  modified_base 16: mod_base = OTHER; note = 2'-fluoro ribonucleotide
  modified_base 17..23: mod_base = OTHER; note = 2'-O-methyl ribonucleotide
  modified_base 1..3: mod_base = OTHER; note = phosphorothioate linkage
  modified_base 21..23: mod_base = OTHER; note = phosphorothioate linkage
tttgatcatacacagcaaacagg

SEQ ID NO: 2202 - RNA, 23 nt, synthetic construct
  source 1..23: mol_type = other RNA
  modified_base 1: mod_base = OTHER; note = 2'-O-methyl ribonucleotide
  modified_base 2: mod_base = OTHER; note = 2'-fluoro ribonucleotide
  modified_base 3..6: mod_base = OTHER; note = 2'-O-methyl ribonucleotide
  modified_base 7: mod_base = OTHER; note = 2'-fluoro ribonucleotide
  modified_base 8: mod_base = OTHER; note = acyclic N-acetyl L-threoninol abasic nucleic acid-3'-phosphate
  modified_base 9..11: mod_base = OTHER; note = 2'-O-methyl ribonucleotide
  modified_base 12: mod_base = OTHER; note = 2'-fluoro ribonucleotide
  modified_base 13: mod_base = OTHER; note = 2'-O-methyl ribonucleotide
  modified_base 14: mod_base = OTHER; note = 2'-fluoro ribonucleotide
  modified_base 15: mod_base = OTHER; note = 2'-O-methyl ribonucleotide
  modified_base 16: mod_base = OTHER; note = 2'-fluoro ribonucleotide
  modified_base 17..23: mod_base = OTHER; note = 2'-O-methyl ribonucleotide
  modified_base 1..3: mod_base = OTHER; note = phosphorothioate linkage
  modified_base 21..23: mod_base = OTHER; note = phosphorothioate linkage
tttgatcntacacagcaaacagg

SEQ ID NO: 2203 - RNA, 23 nt, synthetic construct
  source 1..23: mol_type = other RNA
  modified_base 1: mod_base = OTHER; note = 2'-O-methyl ribonucleotide
  modified_base 2: mod_base = OTHER; note = 2'-fluoro ribonucleotide
  modified_base 3..6: mod_base = OTHER; note = 2'-O-methyl ribonucleotide
  modified_base 7: mod_base = OTHER; note = 2'-fluoro ribonucleotide
  modified_base 8: mod_base = OTHER; note = acyclic N-acetyl L-threoninol abasic nucleic acid-3'-phosphate
  modified_base 9..11: mod_base = OTHER; note = 2'-O-methyl ribonucleotide
  modified_base 12: mod_base = OTHER; note = 2'-fluoro ribonucleotide
  modified_base 13: mod_base = OTHER; note = 2'-O-methyl ribonucleotide
  modified_base 14: mod_base = OTHER; note = 2'-fluoro ribonucleotide
  modified_base 15: mod_base = OTHER; note = 2'-O-methyl ribonucleotide
  modified_base 16: mod_base = OTHER; note = 2'-fluoro ribonucleotide
  modified_base 17..23: mod_base = OTHER; note = 2'-O-methyl ribonucleotide
  modified_base 1..3: mod_base = OTHER; note = phosphorothioate linkage
  modified_base 21..23: mod_base = OTHER; note = phosphorothioate linkage
tttgatcntacacagcaaacagg

SEQ ID NO: 2204 - skipped

SEQ ID NO: 2205 - RNA, 23 nt, synthetic construct
  source 1..23: mol_type = other RNA
  modified_base 1: mod_base = OTHER; note = 2'-O-methyl ribonucleotide
  modified_base 2: mod_base = OTHER; note = 2'-fluoro ribonucleotide
  modified_base 3..6: mod_base = OTHER; note = 2'-O-methyl ribonucleotide
  modified_base 7: mod_base = OTHER; note = acyclic N-acetyl L-threoninol abasic nucleic acid-3'-phosphate
  modified_base 8..11: mod_base = OTHER; note = 2'-O-methyl ribonucleotide
  modified_base 12: mod_base = OTHER; note = 2'-fluoro ribonucleotide
  modified_base 13: mod_base = OTHER; note = 2'-O-methyl ribonucleotide
  modified_base 14: mod_base = OTHER; note = 2'-fluoro ribonucleotide
  modified_base 15: mod_base = OTHER; note = 2'-O-methyl ribonucleotide
  modified_base 16: mod_base = OTHER; note = 2'-fluoro ribonucleotide
  modified_base 17..23: mod_base = OTHER; note = 2'-O-methyl ribonucleotide
  modified_base 1..3: mod_base = OTHER; note = phosphorothioate linkage
  modified_base 21..23: mod_base = OTHER; note = phosphorothioate linkage
tagaccnaggagaaacggctgct

SEQ ID NO: 2206 - RNA, 23 nt, synthetic construct
  source 1..23: mol_type = other RNA
  modified_base 1: mod_base = OTHER; note = 2'-O-methyl ribonucleotide
  modified_base 2: mod_base = OTHER; note = 2'-fluoro ribonucleotide
  modified_base 3..6: mod_base = OTHER; note = 2'-O-methyl ribonucleotide
  modified_base 7: mod_base = OTHER; note = acyclic N-acetyl L-threoninol abasic nucleic acid-3'-phosphate
  modified_base 8..11: mod_base = OTHER; note = 2'-O-methyl ribonucleotide
  modified_base 12: mod_base = OTHER; note = 2'-fluoro ribonucleotide
  modified_base 13: mod_base = OTHER; note = 2'-O-methyl ribonucleotide
  modified_base 14: mod_base = OTHER; note = 2'-fluoro ribonucleotide
  modified_base 15: mod_base = OTHER; note = 2'-O-methyl ribonucleotide
  modified_base 16: mod_base = OTHER; note = 2'-fluoro ribonucleotide
  modified_base 17..23: mod_base = OTHER; note = 2'-O-methyl ribonucleotide
  modified_base 1..3: mod_base = OTHER; note = phosphorothioate linkage
  modified_base 21..23: mod_base = OTHER; note = phosphorothioate linkage
tagaccnaggagaaacggctgct

SEQ ID NO: 2207 - RNA, 23 nt, synthetic construct
  source 1..23: mol_type = other RNA
  modified_base 1: mod_base = OTHER; note = 2'-O-methyl ribonucleotide
  modified_base 2: mod_base = OTHER; note = 2'-fluoro ribonucleotide
  modified_base 3..6: mod_base = OTHER; note = 2'-O-methyl ribonucleotide
  modified_base 7: mod_base = OTHER; note = 2'-fluoro ribonucleotide
  modified_base 8: mod_base = OTHER; note = acyclic N-acetyl L-threoninol abasic nucleic acid-3'-phosphate
  modified_base 9..11: mod_base = OTHER; note = 2'-O-methyl ribonucleotide
  modified_base 12: mod_base = OTHER; note = 2'-fluoro ribonucleotide
  modified_base 13: mod_base = OTHER; note = 2'-O-methyl ribonucleotide
  modified_base 14: mod_base = OTHER; note = 2'-fluoro ribonucleotide
  modified_base 15: mod_base = OTHER; note = 2'-O-methyl ribonucleotide
  modified_base 16: mod_base = OTHER; note = 2'-fluoro ribonucleotide
  modified_base 17..23: mod_base = OTHER; note = 2'-O-methyl ribonucleotide
  modified_base 1..3: mod_base = OTHER; note = phosphorothioate linkage
  modified_base 21..23: mod_base = OTHER; note = phosphorothioate linkage
tagaccanggagaaacggctgct

SEQ ID NO: 2208 - RNA, 23 nt, synthetic construct
  source 1..23: mol_type = other RNA
  modified_base 1: mod_base = OTHER; note = 2'-O-methyl ribonucleotide
  modified_base 2: mod_base = OTHER; note = 2'-fluoro ribonucleotide
  modified_base 3..6: mod_base = OTHER; note = 2'-O-methyl ribonucleotide
  modified_base 7: mod_base = OTHER; note = 2'-fluoro ribonucleotide
  modified_base 8: mod_base = OTHER; note = acyclic N-acetyl L-threoninol abasic nucleic acid-3'-phosphate
  modified_base 9..11: mod_base = OTHER; note = 2'-O-methyl ribonucleotide
  modified_base 12: mod_base = OTHER; note = 2'-fluoro ribonucleotide
  modified_base 13: mod_base = OTHER; note = 2'-O-methyl ribonucleotide
  modified_base 14: mod_base = OTHER; note = 2'-fluoro ribonucleotide
  modified_base 15: mod_base = OTHER; note = 2'-O-methyl ribonucleotide
  modified_base 16: mod_base = OTHER; note = 2'-fluoro ribonucleotide
  modified_base 17..23: mod_base = OTHER; note = 2'-O-methyl ribonucleotide
  modified_base 1..3: mod_base = OTHER; note = phosphorothioate linkage
  modified_base 21..23: mod_base = OTHER; note = phosphorothioate linkage
tagaccanggagaaacggctgct

SEQ ID NO: 2209 - skipped

SEQ ID NO: 2210 - RNA, 23 nt, synthetic construct
  source 1..23: mol_type = other RNA
  modified_base 1: mod_base = OTHER; note = 2'-O-methyl ribonucleotide
  modified_base 2: mod_base = OTHER; note = 2'-fluoro ribonucleotide
  modified_base 3..6: mod_base = OTHER; note = 2'-O-methyl ribonucleotide
  modified_base 7: mod_base = OTHER; note = acyclic N-acetyl L-threoninol abasic nucleic acid-3'phosphate
  modified_base 8..11: mod_base = OTHER; note = 2'-O-methyl ribonucleotide
  modified_base 12: mod_base = OTHER; note = 2'-fluoro ribonucleotide
  modified_base 13: mod_base = OTHER; note = 2'-O-methyl ribonucleotide
  modified_base 14: mod_base = OTHER; note = 2'-fluoro ribonucleotide
  modified_base 15: mod_base = OTHER; note = 2'-O-methyl ribonucleotide
  modified_base 16: mod_base = OTHER; note = 2'-fluoro ribonucleotide
  modified_base 17..23: mod_base = OTHER; note = 2'-O-methyl ribonucleotide
  modified_base 1..3: mod_base = OTHER; note = phosphorothioate linkage
  modified_base 21..23: mod_base = OTHER; note = phosphorothioate linkage
tgtcggntggaattctttttgga

SEQ ID NO: 2211 - RNA, 23 nt, synthetic construct
  source 1..23: mol_type = other RNA
  modified_base 1: mod_base = OTHER; note = 2'-O-methyl ribonucleotide
  modified_base 2: mod_base = OTHER; note = 2'-fluoro ribonucleotide
  modified_base 3..6: mod_base = OTHER; note = 2'-O-methyl ribonucleotide
  modified_base 7: mod_base = OTHER; note = 2'-fluoro ribonucleotide
  modified_base 8: mod_base = OTHER; note = acyclic N-acetyl L-threoninol abasic nucleic acid-3'-phosphate
  modified_base 9..11: mod_base = OTHER; note = 2'-O-methyl ribonucleotide
  modified_base 12: mod_base = OTHER; note = 2'-fluoro ribonucleotide
  modified_base 13: mod_base = OTHER; note = 2'-O-methyl ribonucleotide
  modified_base 14: mod_base = OTHER; note = 2'-fluoro ribonucleotide
  modified_base 15: mod_base = OTHER; note = 2'-O-methyl ribonucleotide
  modified_base 16: mod_base = OTHER; note = 2'-fluoro ribonucleotide
  modified_base 17..23: mod_base = OTHER; note = 2'-O-methyl ribonucleotide
  modified_base 1..3: mod_base = OTHER; note = phosphorothioate linkage
  modified_base 21..23: mod_base = OTHER; note = phosphorothioate linkage
tgtcggtnggaattctttttgga

SEQ ID NO: 2212 - skipped

SEQ ID NO: 2213 - RNA, 21 nt, synthetic construct
  source 1..21: mol_type = other RNA
tgtttgctgtgtaagatcaaa

SEQ ID NO: 2214-2215 - skipped (2 entries)

SEQ ID NO: 2216 - RNA, 21 nt, synthetic construct
  source 1..21: mol_type = other RNA
cagccgtttctcctaggtcta

SEQ ID NO: 2217 - skipped

SEQ ID NO: 2218 - RNA, 21 nt, synthetic construct
  source 1..21: mol_type = other RNA
cagccgtttctccatggtcta

SEQ ID NO: 2219-2220 - skipped (2 entries)

SEQ ID NO: 2221 - RNA, 21 nt, synthetic construct
  source 1..21: mol_type = other RNA
caaaaagaattccagccgaca

SEQ ID NO: 2222 - RNA, 21 nt, synthetic construct
  source 1..21: mol_type = other RNA
caaaaagaattccgaccgaca

SEQ ID NO: 2223 - RNA, 21 nt, synthetic construct
  source 1..21: mol_type = other RNA
  modified_base 1..6: mod_base = OTHER; note = 2'-O-methyl ribonucleotide
  modified_base 7: mod_base = OTHER; note = 2'-fluoro ribonucleotide
  modified_base 8: mod_base = OTHER; note = 2'-O-methyl ribonucleotide
  modified_base 9: mod_base = OTHER; note = 2'-fluoro ribonucleotide
  modified_base 10: mod_base = OTHER; note = 2'-O-methyl ribonucleotide
  modified_base 11: mod_base = OTHER; note = 2'-fluoro ribonucleotide
  modified_base 12..21: mod_base = OTHER; note = 2'-O-methyl ribonucleotide
  modified_base 1..3: mod_base = OTHER; note = phosphorothioate linkage
tgtttgctgtgtatgatcaaa

SEQ ID NO: 2224 - RNA, 21 nt, synthetic construct
  source 1..21: mol_type = other RNA
  modified_base 1..6: mod_base = OTHER; note = 2'-O-methyl ribonucleotide
  modified_base 7: mod_base = OTHER; note = 2'-fluoro ribonucleotide
  modified_base 8: mod_base = OTHER; note = 2'-O-methyl ribonucleotide
  modified_base 9: mod_base = OTHER; note = 2'-fluoro ribonucleotide
  modified_base 10: mod_base = OTHER; note = 2'-O-methyl ribonucleotide
  modified_base 11: mod_base = OTHER; note = 2'-fluoro ribonucleotide
  modified_base 12..21: mod_base = OTHER; note = 2'-O-methyl ribonucleotide
  modified_base 1..3: mod_base = OTHER; note = phosphorothioate linkage
tgtttgctgtgtaagatcaaa

SEQ ID NO: 2225 - RNA, 21 nt, synthetic construct
  source 1..21: mol_type = other RNA
  modified_base 1..6: mod_base = OTHER; note = 2'-O-methyl ribonucleotide
  modified_base 7: mod_base = OTHER; note = 2'-fluoro ribonucleotide
  modified_base 8: mod_base = OTHER; note = 2'-O-methyl ribonucleotide
  modified_base 9: mod_base = OTHER; note = 2'-fluoro ribonucleotide
  modified_base 10: mod_base = OTHER; note = 2'-O-methyl ribonucleotide
  modified_base 11: mod_base = OTHER; note = 2'-fluoro ribonucleotide
  modified_base 12..13: mod_base = OTHER; note = 2'-O-methyl ribonucleotide
  modified_base 14: mod_base = OTHER; note = 2-amino-2'-O-methyladenosine-3'-phosphate
  modified_base 15..21: mod_base = OTHER; note = 2'-O-methyl ribonucleotide
  modified_base 1..3: mod_base = OTHER; note = phosphorothioate linkage
tgtttgctgtgtaagatcaaa

SEQ ID NO: 2226 - skipped

SEQ ID NO: 2227 - RNA, 21 nt, synthetic construct
  source 1..21: mol_type = other RNA
  modified_base 1..6: mod_base = OTHER; note = 2'-O-methyl ribonucleotide
  modified_base 7: mod_base = OTHER; note = 2'-fluoro ribonucleotide
  modified_base 8: mod_base = OTHER; note = 2'-O-methyl ribonucleotide
  modified_base 9: mod_base = OTHER; note = 2'-fluoro ribonucleotide
  modified_base 10: mod_base = OTHER; note = 2'-O-methyl ribonucleotide
  modified_base 11: mod_base = OTHER; note = 2'-fluoro ribonucleotide
  modified_base 12..21: mod_base = OTHER; note = 2'-O-methyl ribonucleotide
  modified_base 1..3: mod_base = OTHER; note = phosphorothioate linkage
cagccgtttctcctaggtcta

SEQ ID NO: 2228 - RNA, 21 nt, synthetic construct
  source 1..21: mol_type = other RNA
  modified_base 1..6: mod_base = OTHER; note = 2'-O-methyl ribonucleotide
  modified_base 7: mod_base = OTHER; note = 2'-fluoro ribonucleotide
  modified_base 8: mod_base = OTHER; note = 2'-O-methyl ribonucleotide
  modified_base 9: mod_base = OTHER; note = 2'-fluoro ribonucleotide
  modified_base 10: mod_base = OTHER; note = 2'-O-methyl ribonucleotide
  modified_base 11: mod_base = OTHER; note = 2'-fluoro ribonucleotide
  modified_base 12..14: mod_base = OTHER; note = 2'-O-methyl ribonucleotide
  modified_base 15: mod_base = OTHER; note = 2-amino-2'-O-methyladenosine-3'-phosphate
  modified_base 16..21: mod_base = OTHER; note = 2'-O-methyl ribonucleotide
  modified_base 1..3: mod_base = OTHER; note = phosphorothioate linkage
cagccgtttctcctaggtcta

SEQ ID NO: 2229 - RNA, 21 nt, synthetic construct
  source 1..21: mol_type = other RNA
  modified_base 1..6: mod_base = OTHER; note = 2'-O-methyl ribonucleotide
  modified_base 7: mod_base = OTHER; note = 2'-fluoro ribonucleotide
  modified_base 8: mod_base = OTHER; note = 2'-O-methyl ribonucleotide
  modified_base 9: mod_base = OTHER; note = 2'-fluoro ribonucleotide
  modified_base 10: mod_base = OTHER; note = 2'-O-methyl ribonucleotide
  modified_base 11: mod_base = OTHER; note = 2'-fluoro ribonucleotide
  modified_base 12..21: mod_base = OTHER; note = 2'-O-methyl ribonucleotide
  modified_base 1..3: mod_base = OTHER; note = phosphorothioate linkage
cagccgtttctccatggtcta

SEQ ID NO: 2230 - RNA, 21 nt, synthetic construct
  source 1..21: mol_type = other RNA
  modified_base 1..6: mod_base = OTHER; note = 2'-O-methyl ribonucleotide
  modified_base 7: mod_base = OTHER; note = 2'-fluoro ribonucleotide
  modified_base 8: mod_base = OTHER; note = 2'-O-methyl ribonucleotide
  modified_base 9: mod_base = OTHER; note = 2'-fluoro ribonucleotide
  modified_base 10: mod_base = OTHER; note = 2'-O-methyl ribonucleotide
  modified_base 11: mod_base = OTHER; note = 2'-fluoro ribonucleotide
  modified_base 12..13: mod_base = OTHER; note = 2'-O-methyl ribonucleotide
  modified_base 14: mod_base = OTHER; note = 2-amino-2'-O-methyladenosine-3'-phosphate
  modified_base 15..21: mod_base = OTHER; note = 2'-O-methyl ribonucleotide
  modified_base 1..3: mod_base = OTHER; note = phosphorothioate linkage
cagccgtttctccatggtcta

SEQ ID NO: 2231 - skipped

SEQ ID NO: 2232 - RNA, 21 nt, synthetic construct
  source 1..21: mol_type = other RNA
  modified_base 1..6: mod_base = OTHER; note = 2'-O-methyl ribonucleotide
  modified_base 7: mod_base = OTHER; note = 2'-fluoro ribonucleotide
  modified_base 8: mod_base = OTHER; note = 2'-O-methyl ribonucleotide
  modified_base 9: mod_base = OTHER; note = 2'-fluoro ribonucleotide
  modified_base 10: mod_base = OTHER; note = 2'-O-methyl ribonucleotide
  modified_base 11: mod_base = OTHER; note = 2'-fluoro ribonucleotide
  modified_base 12..21: mod_base = OTHER; note = 2'-O-methyl ribonucleotide
  modified_base 1..3: mod_base = OTHER; note = phosphorothioate linkage
caaaaagaattccagccgaca

SEQ ID NO: 2233 - RNA, 21 nt, synthetic construct
  source 1..21: mol_type = other RNA
  modified_base 1..6: mod_base = OTHER; note = 2'-O-methyl ribonucleotide
  modified_base 7: mod_base = OTHER; note = 2'-fluoro ribonucleotide
  modified_base 8: mod_base = OTHER; note = 2'-O-methyl ribonucleotide
  modified_base 9: mod_base = OTHER; note = 2'-fluoro ribonucleotide
  modified_base 10: mod_base = OTHER; note = 2'-O-methyl ribonucleotide
  modified_base 11: mod_base = OTHER; note = 2'-fluoro ribonucleotide
  modified_base 12..21: mod_base = OTHER; note = 2'-O-methyl ribonucleotide
  modified_base 1..3: mod_base = OTHER; note = phosphorothioate linkage
caaaaagaattccgaccgaca

SEQ ID NO: 2234-2244 - skipped (11 entries)

SEQ ID NO: 2245 - RNA, 23 nt, synthetic construct
  source 1..23: mol_type = other RNA
  modified_base 7: mod_base = OTHER; note = 5-methyluridine-3'-phosphate
tattgctcaatttttgcaggttc

SEQ ID NO: 2246 - RNA, 23 nt, synthetic construct
  source 1..23: mol_type = other RNA
  modified_base 7: mod_base = OTHER; note = 5-methyluridine-3'-phosphate
tattgctcaatttttgcaggttc

SEQ ID NO: 2247 - RNA, 23 nt, synthetic construct
  source 1..23: mol_type = other RNA
  modified_base 7: mod_base = OTHER; note = 5-methyluridine-3'-phosphate
tattgctcaatttttgcaggttc

SEQ ID NO: 2248 - skipped

SEQ ID NO: 2249 - RNA, 23 nt, synthetic construct
  source 1..23: mol_type = other RNA
  modified_base 7: mod_base = OTHER; note = 5-methyluridine-3'-phosphate
tgtcggttggaattctttttgga

SEQ ID NO: 2250 - RNA, 23 nt, synthetic construct
  source 1..23: mol_type = other RNA
  modified_base 6: mod_base = OTHER; note = 5-methyluridine-3'-phosphate
tttgctcaatttttgcaggtcca

SEQ ID NO: 2251 - RNA, 23 nt, synthetic construct
  source 1..23: mol_type = other RNA
  modified_base 8: mod_base = OTHER; note = 5-methyluridine-3'-phosphate
tcattgctcaatttttgcaggtt

SEQ ID NO: 2252-2254 - skipped (3 entries)

SEQ ID NO: 2255 - RNA, 23 nt, synthetic construct
  source 1..23: mol_type = other RNA
  modified_base 1: mod_base = OTHER; note = 2'-O-methyl ribonucleotide
  modified_base 2: mod_base = OTHER; note = 2'-fluoro ribonucleotide
  modified_base 3..6: mod_base = OTHER; note = 2'-O-methyl ribonucleotide
  modified_base 7: mod_base = OTHER; note = 2'-fluoro ribonucleotide
  modified_base 8..11: mod_base = OTHER; note = 2'-O-methyl ribonucleotide
  modified_base 12: mod_base = OTHER; note = 2'-fluoro-2-thiouridine-3'-phosphate
  modified_base 13: mod_base = OTHER; note = 2'-O-methyl ribonucleotide
  modified_base 14: mod_base = OTHER; note = 2'-fluoro ribonucleotide
  modified_base 15: mod_base = OTHER; note = 2'-O-methyl ribonucleotide
  modified_base 16: mod_base = OTHER; note = 2'-fluoro ribonucleotide
  modified_base 17..23: mod_base = OTHER; note = 2'-O-methyl ribonucleotide
  modified_base 1..3: mod_base = OTHER; note = phosphorothioate linkage
  modified_base 21..23: mod_base = OTHER; note = phosphorothioate linkage
tattgctcaatttttgcaggttc

SEQ ID NO: 2256 - RNA, 23 nt, synthetic construct
  source 1..23: mol_type = other RNA
  modified_base 1: mod_base = OTHER; note = 2'-O-methyl ribonucleotide
  modified_base 2: mod_base = OTHER; note = 2'-fluoro ribonucleotide
  modified_base 3: mod_base = OTHER; note = 2'-O-methyl-2-thiouridine-3'-phosphate
  modified_base 4..6: mod_base = OTHER; note = 2'-O-methyl ribonucleotide
  modified_base 7: mod_base = OTHER; note = 2'-fluoro ribonucleotide
  modified_base 8..11: mod_base = OTHER; note = 2'-O-methyl ribonucleotide
  modified_base 12: mod_base = OTHER; note = 2'-fluoro ribonucleotide
  modified_base 13: mod_base = OTHER; note = 2'-O-methyl ribonucleotide
  modified_base 14: mod_base = OTHER; note = 2'-fluoro ribonucleotide
  modified_base 15: mod_base = OTHER; note = 2'-O-methyl ribonucleotide
  modified_base 16: mod_base = OTHER; note = 2'-fluoro ribonucleotide
  modified_base 17..23: mod_base = OTHER; note = 2'-O-methyl ribonucleotide
  modified_base 1..3: mod_base = OTHER; note = phosphorothioate linkage
  modified_base 21..23: mod_base = OTHER; note = phosphorothioate linkage
tattgctcaatttttgcaggttc

SEQ ID NO: 2257 - RNA, 23 nt, synthetic construct
  source 1..23: mol_type = other RNA
  modified_base 1: mod_base = OTHER; note = 2'-O-methyl ribonucleotide
  modified_base 2: mod_base = OTHER; note = 2'-fluoro ribonucleotide
  modified_base 3..5: mod_base = OTHER; note = 2'-O-methyl ribonucleotide
  modified_base 6: mod_base = OTHER; note = 2'-fluoro ribonucleotide
  modified_base 7: mod_base = OTHER; note = acyclic L-threoninol nucleic acid-thymine-3'-phosphate
  modified_base 8..11: mod_base = OTHER; note = 2'-O-methyl ribonucleotide
  modified_base 12: mod_base = OTHER; note = 2'-fluoro ribonucleotide
  modified_base 13: mod_base = OTHER; note = 2'-O-methyl ribonucleotide
  modified_base 14: mod_base = OTHER; note = 2'-fluoro ribonucleotide
  modified_base 15: mod_base = OTHER; note = 2'-O-methyl ribonucleotide
  modified_base 16: mod_base = OTHER; note = 2'-fluoro ribonucleotide
  modified_base 17..23: mod_base = OTHER; note = 2'-O-methyl ribonucleotide
  modified_base 1..3: mod_base = OTHER; note = phosphorothioate linkage
  modified_base 21..23: mod_base = OTHER; note = phosphorothioate linkage
tattgctcaatttttgcaggttc

SEQ ID NO: 2258 - RNA, 23 nt, synthetic construct
  source 1..23: mol_type = other RNA
  modified_base 1: mod_base = OTHER; note = 2'-O-methyl ribonucleotide
  modified_base 2: mod_base = OTHER; note = 2'-fluoro ribonucleotide
  modified_base 3..5: mod_base = OTHER; note = 2'-O-methyl ribonucleotide
  modified_base 6: mod_base = OTHER; note = 2'-fluoro ribonucleotide
  modified_base 7: mod_base = OTHER; note = acyclic L-threoninol nucleic acid-thymine-3'-phosphate
  modified_base 8..11: mod_base = OTHER; note = 2'-O-methyl ribonucleotide
  modified_base 12: mod_base = OTHER; note = 2'-fluoro-2-thiouridine-3'-phosphate
  modified_base 13: mod_base = OTHER; note = 2'-O-methyl ribonucleotide
  modified_base 14: mod_base = OTHER; note = 2'-fluoro ribonucleotide
  modified_base 15: mod_base = OTHER; note = 2'-O-methyl ribonucleotide
  modified_base 16: mod_base = OTHER; note = 2'-fluoro ribonucleotide
  modified_base 17..23: mod_base = OTHER; note = 2'-O-methyl ribonucleotide
  modified_base 1..3: mod_base = OTHER; note = phosphorothioate linkage
  modified_base 21..23: mod_base = OTHER; note = phosphorothioate linkage
tattgctcaatttttgcaggttc

SEQ ID NO: 2259 - RNA, 23 nt, synthetic construct
  source 1..23: mol_type = other RNA
  modified_base 1: mod_base = OTHER; note = 2'-O-methyl ribonucleotide
  modified_base 2: mod_base = OTHER; note = 2'-fluoro ribonucleotide
  modified_base 3..6: mod_base = OTHER; note = 2'-O-methyl ribonucleotide
  modified_base 7: mod_base = OTHER; note = acyclic L-threoninol nucleic acid-thymine-3'-phosphate
  modified_base 8: mod_base = OTHER; note = 2'-fluoro ribonucleotide
  modified_base 9..11: mod_base = OTHER; note = 2'-O-methyl ribonucleotide
  modified_base 12: mod_base = OTHER; note = 2'-fluoro ribonucleotide
  modified_base 13: mod_base = OTHER; note = 2'-O-methyl ribonucleotide
  modified_base 14: mod_base = OTHER; note = 2'-fluoro ribonucleotide
  modified_base 15: mod_base = OTHER; note = 2'-O-methyl ribonucleotide
  modified_base 16: mod_base = OTHER; note = 2'-fluoro ribonucleotide
  modified_base 17..23: mod_base = OTHER; note = 2'-O-methyl ribonucleotide
  modified_base 1..3: mod_base = OTHER; note = phosphorothioate linkage
  modified_base 21..23: mod_base = OTHER; note = phosphorothioate linkage
tattgctcaatttttgcaggttc

SEQ ID NO: 2260 - RNA, 23 nt, synthetic construct
  source 1..23: mol_type = other RNA
  modified_base 1: mod_base = OTHER; note = 2'-O-methyl ribonucleotide
  modified_base 2: mod_base = OTHER; note = 2'-fluoro ribonucleotide
  modified_base 3..5: mod_base = OTHER; note = 2'-O-methyl ribonucleotide
  modified_base 6: mod_base = OTHER; note = 2'-fluoro ribonucleotide
  modified_base 7: mod_base = OTHER; note = acyclic L-threoninol nucleic acid-adenine-3'-phosphate
  modified_base 8..11: mod_base = OTHER; note = 2'-O-methyl ribonucleotide
  modified_base 12: mod_base = OTHER; note = 2'-fluoro ribonucleotide
  modified_base 13: mod_base = OTHER; note = 2'-O-methyl ribonucleotide
  modified_base 14: mod_base = OTHER; note = 2'-fluoro ribonucleotide
  modified_base 15: mod_base = OTHER; note = 2'-O-methyl ribonucleotide
  modified_base 16: mod_base = OTHER; note = 2'-fluoro ribonucleotide
  modified_base 17..23: mod_base = OTHER; note = 2'-O-methyl ribonucleotide
  modified_base 1..3: mod_base = OTHER; note = phosphorothioate linkage
  modified_base 21..23: mod_base = OTHER; note = phosphorothioate linkage
tagaccaaggagaaacggctgct

SEQ ID NO: 2261 - RNA, 23 nt, synthetic construct
  source 1..23: mol_type = other RNA
  modified_base 1: mod_base = OTHER; note = 2'-O-methyl ribonucleotide
  modified_base 2: mod_base = OTHER; note = 2'-fluoro ribonucleotide
  modified_base 3..5: mod_base = OTHER; note = 2'-O-methyl ribonucleotide
  modified_base 6: mod_base = OTHER; note = 2'-fluoro ribonucleotide
  modified_base 7: mod_base = OTHER; note = acyclic L-threoninol nucleic acid-thymine-3'-phosphate
  modified_base 8..11: mod_base = OTHER; note = 2'-O-methyl ribonucleotide
  modified_base 12: mod_base = OTHER; note = 2'-fluoro ribonucleotide
  modified_base 13: mod_base = OTHER; note = 2'-O-methyl ribonucleotide
  modified_base 14: mod_base = OTHER; note = 2'-fluoro ribonucleotide
  modified_base 15: mod_base = OTHER; note = 2'-O-methyl ribonucleotide
  modified_base 16: mod_base = OTHER; note = 2'-fluoro ribonucleotide
  modified_base 17..23: mod_base = OTHER; note = 2'-O-methyl ribonucleotide
  modified_base 1..3: mod_base = OTHER; note = phosphorothioate linkage
  modified_base 21..23: mod_base = OTHER; note = phosphorothioate linkage
tgtcggttggaattctttttgga

SEQ ID NO: 2262 - RNA, 23 nt, synthetic construct
  source 1..23: mol_type = other RNA
  modified_base 1: mod_base = OTHER; note = 2'-O-methyl ribonucleotide
  modified_base 2: mod_base = OTHER; note = 2'-fluoro ribonucleotide
  modified_base 3..5: mod_base = OTHER; note = 2'-O-methyl ribonucleotide
  modified_base 6: mod_base = OTHER; note = acyclic L-threoninol nucleic acid-thymine-3'-phosphate
  modified_base 7: mod_base = OTHER; note = 2'-fluoro ribonucleotide
  modified_base 8..11: mod_base = OTHER; note = 2'-O-methyl ribonucleotide
  modified_base 12: mod_base = OTHER; note = 2'-fluoro ribonucleotide
  modified_base 13: mod_base = OTHER; note = 2'-O-methyl ribonucleotide
  modified_base 14: mod_base = OTHER; note = 2'-fluoro ribonucleotide
  modified_base 15: mod_base = OTHER; note = 2'-O-methyl ribonucleotide
  modified_base 16: mod_base = OTHER; note = 2'-fluoro ribonucleotide
  modified_base 17..23: mod_base = OTHER; note = 2'-O-methyl ribonucleotide
  modified_base 1..3: mod_base = OTHER; note = phosphorothioate linkage
  modified_base 21..23: mod_base = OTHER; note = phosphorothioate linkage
tttgctcaatttttgcaggtcca

SEQ ID NO: 2263 - RNA, 23 nt, synthetic construct
  source 1..23: mol_type = other RNA
  modified_base 1: mod_base = OTHER; note = 2'-O-methyl ribonucleotide
  modified_base 2: mod_base = OTHER; note = 2'-fluoro ribonucleotide
  modified_base 3..6: mod_base = OTHER; note = 2'-O-methyl ribonucleotide
  modified_base 7: mod_base = OTHER; note = 2'-fluoro ribonucleotide
  modified_base 8: mod_base = OTHER; note = acyclic L-threoninol nucleic acid-thymine-3'-phosphate
  modified_base 9..11: mod_base = OTHER; note = 2'-O-methyl ribonucleotide
  modified_base 12: mod_base = OTHER; note = 2'-fluoro ribonucleotide
  modified_base 13: mod_base = OTHER; note = 2'-O-methyl ribonucleotide
  modified_base 14: mod_base = OTHER; note = 2'-fluoro ribonucleotide
  modified_base 15: mod_base = OTHER; note = 2'-O-methyl ribonucleotide
  modified_base 16: mod_base = OTHER; note = 2'-fluoro ribonucleotide
  modified_base 17..23: mod_base = OTHER; note = 2'-O-methyl ribonucleotide
  modified_base 1..3: mod_base = OTHER; note = phosphorothioate linkage
  modified_base 21..23: mod_base = OTHER; note = phosphorothioate linkage
tcattgctcaatttttgcaggtt

SEQ ID NO: 2264-2273 - skipped (10 entries)

SEQ ID NO: 2274 - RNA, 21 nt, synthetic construct
  source 1..21: mol_type = other RNA
gacctgcaaaaattgagcaaa

SEQ ID NO: 2275 - RNA, 21 nt, synthetic construct
  source 1..21: mol_type = other RNA
cctgcaaaaattgagcaatga

SEQ ID NO: 2276-2285 - skipped (10 entries)

SEQ ID NO: 2286 - RNA, 21 nt, synthetic construct
  source 1..21: mol_type = other RNA
  modified_base 1..6: mod_base = OTHER; note = 2'-O-methyl ribonucleotide
  modified_base 7: mod_base = OTHER; note = 2'-fluoro ribonucleotide
  modified_base 8: mod_base = OTHER; note = 2'-O-methyl ribonucleotide
  modified_base 9: mod_base = OTHER; note = 2'-fluoro ribonucleotide
  modified_base 10: mod_base = OTHER; note = 2'-O-methyl ribonucleotide
  modified_base 11: mod_base = OTHER; note = 2'-fluoro ribonucleotide
  modified_base 12..21: mod_base = OTHER; note = 2'-O-methyl ribonucleotide
  modified_base 1..3: mod_base = OTHER; note = phosphorothioate linkage
gacctgcaaaaattgagcaaa

SEQ ID NO: 2287 - RNA, 21 nt, synthetic construct
  source 1..21: mol_type = other RNA
  modified_base 1..6: mod_base = OTHER; note = 2'-O-methyl ribonucleotide
  modified_base 7: mod_base = OTHER; note = 2'-fluoro ribonucleotide
  modified_base 8: mod_base = OTHER; note = 2'-O-methyl ribonucleotide
  modified_base 9: mod_base = OTHER; note = 2'-fluoro ribonucleotide
  modified_base 10: mod_base = OTHER; note = 2'-O-methyl ribonucleotide
  modified_base 11: mod_base = OTHER; note = 2'-fluoro ribonucleotide
  modified_base 12..21: mod_base = OTHER; note = 2'-O-methyl ribonucleotide
  modified_base 1..3: mod_base = OTHER; note = phosphorothioate linkage
cctgcaaaaattgagcaatga

SEQ ID NO: 2288-2294 - skipped (7 entries)

SEQ ID NO: 2295 - RNA, 23 nt, synthetic construct
  source 1..23: mol_type = other RNA
  modified_base 8: mod_base = OTHER; note = 5-methyluridine-3'-phosphate
tgtcggttggaattctttttgga

SEQ ID NO: 2296-2301 - skipped (6 entries)

SEQ ID NO: 2302 - RNA, 23 nt, synthetic construct
  source 1..23: mol_type = other RNA
  modified_base 1: mod_base = OTHER; note = 2'-O-methyl ribonucleotide
  modified_base 2: mod_base = OTHER; note = 2'-fluoro ribonucleotide
  modified_base 3..6: mod_base = OTHER; note = 2'-O-methyl ribonucleotide
  modified_base 7: mod_base = OTHER; note = 2'-fluoro ribonucleotide
  modified_base 8: mod_base = OTHER; note = acyclic L-threoninol nucleic acid-thymine-3'-phosphate
  modified_base 9..11: mod_base = OTHER; note = 2'-O-methyl ribonucleotide
  modified_base 12: mod_base = OTHER; note = 2'-fluoro ribonucleotide
  modified_base 13: mod_base = OTHER; note = 2'-O-methyl ribonucleotide
  modified_base 14: mod_base = OTHER; note = 2'-fluoro ribonucleotide
  modified_base 15: mod_base = OTHER; note = 2'-O-methyl ribonucleotide
  modified_base 16: mod_base = OTHER; note = 2'-fluoro ribonucleotide
  modified_base 17..23: mod_base = OTHER; note = 2'-O-methyl ribonucleotide
  modified_base 1..3: mod_base = OTHER; note = phosphorothioate linkage
  modified_base 21..23: mod_base = OTHER; note = phosphorothioate linkage
tgtcggttggaattctttttgga

SEQ ID NO: 2303 - RNA, 23 nt, synthetic construct
  source 1..23: mol_type = other RNA
  modified_base 1: mod_base = OTHER; note = 2'-O-methyl ribonucleotide
  modified_base 2: mod_base = OTHER; note = 2'-fluoro ribonucleotide
  modified_base 3..5: mod_base = OTHER; note = 2'-O-methyl ribonucleotide
  modified_base 6: mod_base = OTHER; note = 2'-fluoro ribonucleotide
  modified_base 7: mod_base = OTHER; note = acyclic N-acetyl L-threoninol abasic nucleic acid-3'phosphate
  modified_base 8..11: mod_base = OTHER; note = 2'-O-methyl ribonucleotide
  modified_base 12: mod_base = OTHER; note = 2'-fluoro ribonucleotide
  modified_base 13: mod_base = OTHER; note = 2'-O-methyl ribonucleotide
  modified_base 14: mod_base = OTHER; note = 2'-fluoro ribonucleotide
  modified_base 15: mod_base = OTHER; note = 2'-O-methyl ribonucleotide
  modified_base 16: mod_base = OTHER; note = 2'-fluoro ribonucleotide
  modified_base 17..23: mod_base = OTHER; note = 2'-O-methyl ribonucleotide
  modified_base 1..3: mod_base = OTHER; note = phosphorothioate linkage
  modified_base 21..23: mod_base = OTHER; note = phosphorothioate linkage
tgtcggntggaattctttttgga

SEQ ID NO: 2304-2329 - skipped (26 entries)

SEQ ID NO: 2330 - RNA, 21 nt, synthetic construct
  source 1..21: mol_type = other RNA
  modified_base 1..6: mod_base = OTHER; note = 2'-O-methyl ribonucleotide
  modified_base 7: mod_base = OTHER; note = 2'-fluoro ribonucleotide
  modified_base 8: mod_base = OTHER; note = 2'-O-methyl ribonucleotide
  modified_base 9..11: mod_base = OTHER; note = 2'-fluoro ribonucleotide
  modified_base 12..21: mod_base = OTHER; note = 2'-O-methyl ribonucleotide
  modified_base 1..3: mod_base = OTHER; note = phosphorothioate linkage
gtcatccacaatgagagtaca

SEQ ID NO: 2331 - RNA, 23 nt, synthetic construct
  source 1..23: mol_type = other RNA
  modified_base 1: mod_base = OTHER; note = 2'-O-methyl ribonucleotide
  modified_base 2: mod_base = OTHER; note = 2'-fluoro ribonucleotide
  modified_base 3..5: mod_base = OTHER; note = 2'-O-methyl ribonucleotide
  modified_base 6: mod_base = OTHER; note = thymidine-glycol nucleic acid (GNA) S-isomer
  modified_base 7..13: mod_base = OTHER; note = 2'-O-methyl ribonucleotide
  modified_base 14: mod_base = OTHER; note = 2'-fluoro ribonucleotide
  modified_base 15: mod_base = OTHER; note = 2'-O-methyl ribonucleotide
  modified_base 16: mod_base = OTHER; note = 2'-fluoro ribonucleotide
  modified_base 17..23: mod_base = OTHER; note = 2'-O-methyl ribonucleotide
  modified_base 1..3: mod_base = OTHER; note = phosphorothioate linkage
  modified_base 21..23: mod_base = OTHER; note = phosphorothioate linkage
tgtactctcattgtggatgacga

SEQ ID NO: 2332 - protein, 5 aa, synthetic construct
YIGSR

SEQ ID NO: 2333 - protein, 4 aa, synthetic construct
  SITE 1: note = N-formyl-methionyl
  SITE 2: note = leucyl
MLFK
